(19) United States
(12) Patent Application Publication
(10) Pub. No.: US 2014/0113376 A1
(43) Pub. Date: Apr. 24, 2014

(54) COMPOSITIONS AND METHODS FOR DOWNREGULATING PROKARYOTIC GENES

(71) Applicants: Rotem Sorek, Rehovot (IL); Gil Amitai, Rehovot (IL)

(72) Inventors: Rotem Sorek, Rehovot (IL); Gil Amitai, Rehovot (IL)

(21) Appl. No.: 14/123,267

(22) PCT Filed: May 31, 2012
(86) PCT No.: PCT/IL12/50194

§ 371 Date: Dec. 2, 2013

Related U.S. Application Data
(60) Provisional application No. 61/491,943, filed on Jun. 1, 2011.

(51) Int. Cl. C07K 14/195

(52) U.S. Cl. CPC C07K 14/195
USPC 435/471; 536/23.7

(57) ABSTRACT

An isolated polynucleotide is disclosed. The polynucleotide comprises a clustered, regularly interspaced short palindromic repeat (CRISPR) array nucleic acid sequence wherein at least one spacer of the CRISPR is sufficiently complementary to a portion of at least one prokaryotic gene so as to down-regulate expression of the prokaryotic gene and further comprises a nucleic acid sequence encoding at least one CRISPR associated (CAS) polypeptide of a repeat associated mysterious protein (RAMP) family. Uses of the polynucleotides and pharmaceutical compositions comprising the polynucleotides are also disclosed.

### FIELD AND BACKGROUND OF THE INVENTION

[0001] The present invention, in some embodiments thereof, relates to methods of downregulating prokaryotic genes and, more particularly, but not exclusively, to methods of downregulating bacterial genes.

[0002] One of the most successful ways for understanding the function of a gene within an organism is to silence its expression. This is usually done by modifying, interrupting or deleting the DNA of the gene, and is referred to as gene ‘knockout’ [Austin et al., 2004, Nature Genetics 36:921-4]. Gene knockouts are mostly carried out through homologous recombination, and this method was used in multiple studies and in multiple organisms from bacteria to mammals.

[0003] Despite the fact that gene targeting by knockout is a powerful tool, it is a complex, labor intensive and time consuming procedure. It is therefore hard to scale up cost-effectively, and most studies are generally limited to a knockout of a single gene rather than a complete pathway. Moreover, knockout is mostly limited to organisms in which homologous recombination is relatively efficient, such as mouse [Austin et al., 2004, Nature Genetics 36:921-4] and yeast [Deutscher et al., 2006, Nature Genetics 38:993-8].

[0004] A breakthrough in the search for efficient alternative to gene knockouts in eukaryotes was achieved when it was realized that RNA-interference (RNAi) could be used to silence the expression of specific genes without interruption of their DNA. RNAi is a conserved biological mechanism first discovered in the nematode Caenorhabditis elegans, where it was demonstrated that injection of long dsRNA into this nematode led to sequence-specific degradation of the corresponding mRNAs. This silencing response has been subsequently found in other eukaryotes including fungi, plants and mammals [Fire et al., 1998, Nature 391(6669):806-11; Hannon, 2002, Nature 418(6894):244-51].

[0005] While the role of RNAi is, at least in part, to protect against viral infections and mobile element infestations, it was also shown that artificial transfection of short dsRNA duplexes, which target specific endogenous mRNAs, into mammalian cells can trigger gene specific silencing [Elbashir et al., 2001, Nature. 2001 May 24; 411(6836):494-8]. These short dsRNAs (called siRNAs) are converted into single strands by the RNA-induced silencing protein complex (RISC), and the RISC-siRNA complex identifies target mRNAs by base pairing, leading to their degradation by an RNA nuclease. Researchers are now using this RNAi gene silencing technology and its derivatives to understand the biological function of endogenous genes in many eukaryotic organisms, and usage of this technology has led to important scientific breakthroughs.

[0006] The enormous advantages of RNAi in genetic studies have so far not been reproduced in prokaryotes (bacteria and archaea), because the RNAi system seems to be limited to the eukaryotic lineage.

[0007] U.S. Patent Application 20040053289 teaches the use of si hybrids to down-regulate prokaryotic genes.

[0008] CRISPR is a genetic system comprised of a cluster of short repeats (24-47 bp long), interspersed by similarly sized non repetitive sequences (called spacers). Additional components of the system include CRISPR-associated (CAS) genes and a leader sequence (FIG. 1A). This system is abundant among prokaryotes, and computational analyses show that CRISPRs are found in ˜40% of bacterial and ˜90% of archaeal genomes sequenced to date [Grissa et al, 2007, BMC Bioinformatics 8: 17].

[0009] CRISPR arrays and CAS genes vary greatly among microbial species. The direct repeat sequences frequently diverge between species, and extreme sequence divergence is also observed in the CAS genes. The size of the repeat can vary between 24 and 47 bp, with spacer sizes of 26-72 bp. The number of repeats per array can vary from 2 to the current record holder, Haliangium ochraceum, which has 382 repeats in one array and, although many genomes contain a single CRISPR locus, M. jannaschii has 18 loci. Finally, although in some CRISPR systems only 6, or fewer, CAS genes have been identified, others involve more than 20. Despite this diversity, most CRISPR systems have some conserved characteristics (FIG. 1A).

[0010] It was recently demonstrated experimentally that in response to phage infection, bacteria integrate new spacers that are derived from phage genomic sequences, resulting in CRISPR-mediated phage resistance. The new repeat-spacer units were added at the leader-proximal end of the array, and had to match the phage sequence exactly (100% identity), to provide complete resistance. When such phage-derived spacers were artificially introduced into the CRISPR array of a phage-sensitive S. thermophilus strain, it became phage-resistant [Barrangou et al, 2007, Science 315(5819): 1709-12]. Indeed, spacers found in naturally occurring CRISPR arrays are frequently derived from phages and other extrachromosomal elements [Bolotin et al., 2005, Microbiology 151(Pt 8): 2551-61].

[0011] Additional background art includes Horvath et al [International Publication No. WO2008/108989, Bronus et al [Science, 321, 960 (2008)], U.S. Application No: 20100076057 and Sorek et al., [Nature Reviews Microbiology, 6, 181, 2008].

### SUMMARY OF THE INVENTION

[0012] According to an aspect of some embodiments of the present invention there is provided an isolated polynucleotide, comprising

[0013] (i) a clustered, regularly interspaced short palindromic repeat (CRISPR) array nucleic acid sequence wherein at least one spacer of the CRISPR is sufficiently complementary to a portion of at least one prokaryotic gene so as to down-regulate expression of the prokaryotic gene; and

[0014] (ii) a nucleic acid sequence encoding at least one CRISPR associated (CAS) polypeptide of a repeat associated mysterious protein (RAMP) family.

[0015] According to an aspect of some embodiments of the present invention there is provided a nucleic acid construct comprising the isolated polynucleotide of the present invention.

[0016] According to an aspect of some embodiments of the present invention there is provided a nucleic acid construct system comprising:

[0017] (i) a first nucleic acid construct comprising an isolated polynucleotide having a clustered, regularly interspaced short palindromic repeat (CRISPR) array nucleic acid sequence wherein at least one spacer of the CRISPR is sufficiently complementary to a portion of at least one prokaryotic gene so as to down-regulate expression of the prokaryotic gene; and

[0018] (ii) a second nucleic acid construct comprising an isolated polynucleotide having a nucleic acid sequence encoding at least one CRISPR associated (CAS) polypeptide of a repeat associated mysterious protein (RAMP) family.

[0019] According to an aspect of some embodiments of the present invention there is provided a method of down-regulating expression of a gene of a prokaryotic cell, the method comprising introducing into the cell a CRISPR system polynucleotide encoding a CRISPR array and at least one CRISPR associated (CAS) polypeptide of a repeat associated mysterious protein (RAMP) family, wherein a spacer of the CRISPR array is sufficiently complementary with a portion of the gene to down-regulate expression of the gene, thereby down-regulating expression of gene of a prokaryotic cell.

[0020] According to an aspect of some embodiments of the present invention there is provided a nucleic acid construct comprising two repeat sequences of a CRISPR array flanking a cloning site or making a cloning site when concatenated.

[0021] According to an aspect of some embodiments of the present invention there is provided a method of treating a bacterial infection in a subject in need thereof, the method comprising administering to the subject a therapeutically effective amount of an isolated polynucleotide, comprising a clustered, regularly interspaced short palindromic repeat (CRISPR) system nucleic acid sequence, the CRISPR system encoding a CRISPR array and at least one CRISPR associated (CAS) polypeptide of a repeat associated mysterious protein (RAMP) family wherein at least one spacer of the CRISPR array is sufficiently complementary to a portion of at least one bacterial gene so as to down-regulate expression of the bacterial gene, the bacterial gene being a vital bacterial gene or a bacterial virulence gene, thereby treating the bacterial infection.

[0022] According to an aspect of some embodiments of the present invention there is provided a method of treating an antibiotic-resistant bacterial infection in a subject in need thereof, the method comprising administering to the subject the isolated polynucleotide of the present invention, thereby treating the antibiotic-resistant bacterial infection.

[0023] According to an aspect of some embodiments of the present invention there is provided a method of annotating a prokaryotic gene, the method comprising:

[0024] (a) introducing the isolated polynucleotide of the present invention into a prokaryote under conditions that allow downregulation of the prokaryotic gene; and

[0025] (b) assaying a phenotype of the prokaryote, wherein a change in phenotype following the introducing is indicative of the prokaryotic gene being associated with the phenotype.

[0026] According to some embodiments of the invention, the at least one spacer comprises at least two spacers, each being sufficiently complementary to a portion of different prokaryotic genes so as to down-regulate expression of the different prokaryotic genes.

[0027] According to some embodiments of the invention, the at least one spacer comprises 26-72 base pairs.

[0028] According to some embodiments of the invention, the prokaryotic gene is a bacterial gene.

[0029] According to some embodiments of the invention, the bacterial gene is associated with down-regulation of biofuel production.

[0030] According to some embodiments of the invention, the bacterial gene is selected from the group consisting of acetate kinase, phosphate acetyltransferase and L-lactate dehydrogenase.

[0031] According to some embodiments of the invention, the bacterial gene is a genetic repressor CcpN.

[0032] According to some embodiments of the invention, the bacterial gene is an antibiotic resistance gene.

[0033] According to some embodiments of the invention, the antibiotic resistance gene is a methicillin resistance gene or a vancomycin resistance gene.

[0034] According to some embodiments of the invention, the bacterial gene is a bacterial virulence gene.

[0035] According to some embodiments of the invention, the bacterial gene is a ribosomal RNA gene, a ribosomal protein gene or a tRNA synthestase gene.

[0036] According to some embodiments of the invention, the bacterial gene is selected from the group consisting of dnaB, fabI, folA, gyrB, murA, pytH, metG, and tufA(B).

[0037] According to some embodiments of the invention, the prokaryotic gene is an archaeal gene.

[0038] According to some embodiments of the invention, the isolated polynucleotide further comprises a nucleic acid sequence encoding a CRISPR leader sequence.

[0039] According to some embodiments of the invention, the mesophilic organism is Neisseria sicca ATCC29256.

[0040] According to some embodiments of the invention, the nucleic acid construct comprises a nucleic acid sequence encoding at least one polypeptide having at sequence selected from the group consisting of SEQ ID NOs: 1354-1360.

[0041] According to some embodiments of the invention, the nucleic acid construct encodes each of the polypeptides as set forth in SEQ ID NOs: 1354-1360.

[0042] According to some embodiments of the invention, the at least one CAS polypeptide comprises an amino acid sequence selected from the group consisting of SEQ ID NOs: 1354-1360.

[0043] According to some embodiments of the invention, the first nucleic acid construct comprises a leader sequence upstream to the at least one spacer as set forth in SEQ ID NO: 1374.

[0044] According to some embodiments of the invention, a repeat sequence of the CRISPR array is as set forth in SEQ ID NO: 1369, 1373, 1374 or 1375.

[0045] According to some embodiments of the invention, the nucleic acid construct further comprises a leader sequence of the CRISPR array.

[0046] According to some embodiments of the invention, CRISPR array is of a RAMP module.

[0047] According to some embodiments of the invention, the nucleic acid construct further comprises at least one spacer sequence of the CRISPR array.

[0048] According to some embodiments of the invention, the at least one CRISPR associated (CAS) polypeptide of a RAMP family is of a mesophilic organism.

[0049] According to some embodiments of the invention, the at least one CRISPR associated (CAS) polypeptide of a RAMP family is of a thermophilic organism.

[0050] According to some embodiments of the invention, the nucleic acid sequence encoding at least one CRISPR associated (CAS) polypeptide of a RAMP family comprises a sequence encoding a RAMP module.

[0051] According to some embodiments of the invention, the isolated polynucleotide is non-naturally occurring.

[0052] According to some embodiments of the invention, the nucleic acid construct comprises a nucleic acid sequence selected from the group consisting of SEQ ID NOs: 1, 6 and 11.

[0053] According to some embodiments of the invention, the nucleic acid construct comprises a cis regulatory element.

[0054] According to some embodiments of the invention, the cis regulatory element is a promoter.

[0055] According to some embodiments of the invention, the promoter is an inducible promoter.

[0056] According to some embodiments of the invention, the gene is not introduced into the cell by a bacteriophage.

[0057] According to some embodiments of the invention, the gene is integrated into a chromosome of the cell.

[0058] According to some embodiments of the invention, the gene is endogenous to the prokaryotic cell.

[0059] According to some embodiments of the invention, the gene is epichromosomal.

[0060] According to some embodiments of the invention, the method further comprises introducing into the cell a naïve CRISPR array system.

[0061] According to some embodiments of the invention, the bacterial infection is induced by methicillin resistant Staphylococcus aureus or vancomycin resistant Staphylococcus aureus.

[0062] Unless otherwise defined, all technical and/or scientific terms used herein have the same meaning as commonly understood by one of ordinary skill in the art to which the invention pertains. Although methods and materials similar or equivalent to those described herein can be used in the practice or testing of embodiments of the invention, exemplary methods and/or materials are described below. In case of conflict, the patent specification, including definitions, will control. In addition, the materials, methods, and examples are illustrative only and are not intended to be necessarily limiting.

### BRIEF DESCRIPTION OF THE DRAWINGS

[0063] Some embodiments of the invention are herein described, by way of example only, with reference to the accompanying drawings. With specific reference now to the drawings in detail, it is stressed that the particulars shown are by way of example and for purposes of illustrative discussion of embodiments of the invention. In this regard, the description taken with the drawings makes apparent to those skilled in the art how embodiments of the invention may be practiced.

[0064] In the drawings:

[0065] FIG. 1A is a typical structure of a CRISPR locus (system).

[0066] FIG. 1B is a model illustrating how CRISPR acquires phage-derived spacers which provide immunity (adapted from Sorek et al. Nature Reviews Microbiology, 6, 181, 2007). Following an attack by phage, phage nucleic acids proliferate in the cell and new particles are produced leading to death of the majority of sensitive bacteria. A small number of bacteria acquire phage derived spacers (blue spacer, marked by asterix) leading to survival, presumably via CRISPR-mediated degradation of phage mRNA or DNA.

[0067] FIG. 2 is a model teaching an exemplary method of silencing of self genes with an engineered RAMP (repeat associated mysterious protein) module. The RAMP module (containing the CRISPR array as well as Cas proteins) is cloned into a plasmid. Fragments from a chromosome-encoded gene (green) that is expressed to RNA the cell (green waves) are engineered into the CRISPR array as new spacers. When the engineered RAMP module is inserted inside the prokaryotic cell, the system silences the expression of the RNA of the self gene (silenced RNA is depicted in the figure as dashed green waves). The plasmid carrying the CRISPR can contain an inducible promoter, that turns the expression of the system on only in a certain condition. Thus, a conditional silencing of self genes could be achieved. The cas genes and the CRISPR array could also be cloned on two different plasmids.

[0068] FIG. 3 is a schematic drawing illustrating the organization of the Myxococcus xanthus DK 1622 Genbank AC_{—}008095 RAMP module.

[0069] FIG. 4 is a schematic drawing illustrating the RAMP module of the Myxococcus xanthus DK 1622 cloned into the pCDFDuet-1 plasmid under the control of an inducible promoter.

[0070] FIG. 5 is a schematic drawing illustrating the genomic vicinity of the RAMP module of the Myxococcus xanthus DK 1622. The illustration shows that another CRISPR system, of the Tneap subtype, is located at a nearby region of the genome.

[0071] FIG. 6 is a schematic drawing illustrating the organization of the Myxococcus xanthus DK 1622 Genbank AC_{—}008095 Tneap CRISPR system.

[0072] FIG. 7 is a polynucleotide sequence of a CRISPR construct for silencing of GFP expression in E. coli (SEQ ID NO: 1340). The sequences in red are sequences of a spacers which target the antisense strand of GFP. The highlighted yellow region shows the repeat sequence of this construct.

[0073] FIG. 8 is a polynucleotide sequence of a CRISPR construct for silencing of malF expression in E. coli (SEQ ID NO: 1341). The sequences in red are sequences of a spacers which target the antisense strand of malF. The highlighted yellow region shows the repeat sequence of this construct.

[0074] FIG. 9 is a polynucleotide sequence of a CRISPR construct for silencing of RFP expression in E. coli (SEQ ID NO: 1342). The sequences in red are sequences of a spacers which target the antisense strand of RFP. The highlighted yellow region shows the repeat sequence of this construct.

[0075] FIG. 10 is a polynucleotide sequence of a CRISPR construct for silencing of GFP and malF expression, together, in E. coli (SEQ ID NO: 1343). The sequences in red are sequence of spacers which target the antisense strand of GFP. The sequences in blue are sequence of spacers which target the sense strand of malF. The highlighted yellow region shows the repeat sequence of this construct.

[0076] FIG. 11 is a polynucleotide sequence of a control CRISPR construct which does not target any gene of interest (SEQ ID NO: 1344). The highlighted yellow region shows the repeat sequence of this construct.

[0077] FIG. 12 is a polynucleotide sequence of GFP showing the positions of the sequences targeted by an exemplary CRISPR construct in red (SEQ ID NO: 1345).

[0078] FIG. 13 is a polynucleotide sequence of malF showing the positions of the sequences targeted by an exemplary CRISPR construct in red (SEQ ID NO: 1346).

[0079] FIGS. 14A-B is a schematic representation illustrating the organization of the Neisseria sicca ATCC29256 CRISPR-RAMP module (Genbank accession No. NZ_ACK002000045). FIG. 14A—the organization of the RAMP module on the bacteria genome; FIG. 14B—the RAMP module was placed on a 3-plasmid system. A fourth plasmid (RFP/GFP) was designed as a reporter plasmid.

[0080] FIGS. 15A-B illustrates the activity of heterologous RAMP systems within E. coli. (FIG. 15A) The N. sicca RAMP module was cloned into E. coli BL21 (DE3) on a compatible plasmid system (pET-Duet) divided into 3 operons. All operons were inducible with IPTG. (FIG. 15B) Gene and crRNA expression in the tested system was induced with 0.1 mM IPTG for 4 hours. RNA was extracted, and Northern blots were performed using a probe designed to hybridize to one of the spacers in the crRNA array. A band pattern typical of crRNA processing was observed in the systems, with the strongest band corresponding to the single crRNA unit processed by Cash. Further maturation of crRNAs, probably reflecting 3′ end trimming, was also observed.

[0081] FIGS. 16A-B illustrates a fluorescence based system to measure RAMP activity. (FIG. 16A) Native spacers within the CRISPR array were replaced by spacers targeting GFP. A fourth plasmid (pRSF-Duet) was introduced to the system, expressing both GFP and RFP. (FIG. 16B) Expression of the Neisseria sicca RAMP system within E. coli, with spacers targeting GFP (red curve), results in reduction of GFP fluorescence but not of RFP, indicating an expression silencing at the RNA rather than the DNA level. No such reduction was observed when 4 native spacers were expressed in the crRNA (blue curve). Fluorescence and O.D. were measured every 13 minutes in biological quadruplicates for E. coli continuously growing with shaking at 37° C. within a robotic plate reader (Tecan Infinite 200 Pro).

[0082] FIG. 17 is a schematic representation of a construct based on the Neiserria sicca RAMP repeat-spacer array that allows the insertion of any spacer of choice.

### DESCRIPTION OF SPECIFIC EMBODIMENTS OF THE INVENTION

[0083] The present invention, in some embodiments thereof, relates to methods of downregulating prokaryotic genes and, more particularly, but not exclusively, to methods of downregulating bacterial genes.

[0084] Before explaining at least one embodiment of the invention in detail, it is to be understood that the invention is not necessarily limited in its application to the details set forth in the following description or exemplified by the Examples. The invention is capable of other embodiments or of being practiced or carried out in various ways.

[0085] The clusters of regularly interspaced short palindromic repeat (CRISPR) system is associated with defense of bacteria and archaea providing protection thereto against invading phages. Resistance is acquired by incorporating short stretches of invading DNA sequences in genomic CRISPR loci. These integrated sequences are thought to function as a genetic memory that prevents the host from being infected by viruses containing this recognition sequence.

[0086] It has previously been proposed that CRISPR's ability to down-regulate extrachromosomal DNA may be manipulated such that it can also down-regulate genes that are integrated into the chromosome of a cell. Thus, it was proposed that in order to selectively down-regulate a gene of interest, a CRISPR-bearing plasmid may be transformed into a prokaryotic cell of choice (e.g. bacterial cell) with one of the spacers being changed to match the gene of interest (Sorek et al, 2008, Nature Reviews Microbiology, 6, 181).

[0087] However, previous attempts to engineer the CRISPR system to down regulate endogenous genes have failed, due to the discovery that many CRISPR systems target DNA rather than RNA [Marraffini & Sontheimer, Science 322, 1843 (2008)]. In order to circumvent this problem, the present inventors suggest using a specific CRISPR subtype, called the RAMP module (or cmr module). Recent evidence suggests that the RAMP module (or cmr module) is unique, and performs its action by silencing RNA rather than DNA [Hale et al, Cell 139, 863, 2009]. However, most natural RAMP modules, including the one that was experimentally examined [Hale et al, Cell 139, 863, 2009], occur within thermophilic (high-temperature-adapter) prokaryotes, and are thus not expected to work well in human pathogens and in model organisms such as E. coli.

[0088] The present inventors propose engineering polynucleotides of the CRISPR system which encode a CRISPR array and at least one CRISPR associated (CAS) polypeptide of a repeat associated mysterious protein (RAMP) family so that its spacers will target endogenous genes. This targeting is expected to result in degradation of the targeted mRNA, thus allowing selective silencing of specific genes of choice within bacteria, i.e., selective gene knock-down without manipulation of the original microbial genome (as explained above).

[0089] Thus, according to one aspect of the present invention there is provided a method of down-regulating expression of a gene of a prokaryotic cell. The method comprises introducing into the cell a CRISPR system encoding a CRISPR array and at least one CRISPR associated (CAS) polypeptide of a repeat associated mysterious protein (RAMP) family, wherein a spacer of the CRISPR array is sufficiently complementary with a portion of the gene to down-regulate expression of the gene.

[0090] In an exemplary embodiment, the gene is not introduced into the cell by a bacteriophage.

[0091] As used herein, the phrase “down-regulating” refers to reducing or inhibiting the expression level of the gene, on the RNA and optionally on the protein level. According to one embodiment, the gene is down-regulated by at least 10%. According to another embodiment, the gene is down-regulated by at least 20%. According to another embodiment, the gene is down-regulated by at least 30%. According to another embodiment, the gene is down-regulated by at least 40%. According to another embodiment, the gene is down-regulated by at least 50%. According to another embodiment, the gene is down-regulated by at least 60%. According to another embodiment, the gene is down-regulated by at least 70%. According to another embodiment, the gene is down-regulated by at least 80%. According to another embodiment, the gene is down-regulated by at least 90%. According to another embodiment, the gene is down-regulated by 100% (i.e. inhibiting gene expression).

[0092] As used herein, the term “gene” refers to a DNA sequence which encodes a polypeptide or a non-coding, functional RNA.

[0093] The phrase “gene of a prokaryotic cell” refers to a gene that is present in the prokaryotic cell but not necessarily integrated into the chromosome of the prokaryotic cell.

[0094] According to one embodiment, the genes which are down-regulated are those that are integrated into the chromosome of the prokaryote.

[0095] According to another embodiment, the genes which are down-regulated are those that remain outside the chromosome i.e. remain epichromosomal.

[0096] According to another embodiment, the gene is endogenous to the cell. The term “endogenous gene” refers to a native gene in its natural location in the genome of an organism.

[0097] Examples of contemplated genes that may be downregulated according to the method of this aspect of the present invention, include, but are not limited to genes associated with down-regulation of organic material production in bacteria.

[0098] Thus, for example, the present invention contemplates the down-regulation of genes whose knockout enhanced the production of ethanol as a biofuel. Shaw et al., (PNAS 2008, Sep. 16; 105(37):1769-74) teaches the knock-out of a number of genes (namely acetate kinase, phosphate acetyltransferase and L-lactate dehydrogenase, examples of sequences of each can be found in refseq accession no: NC_{—}009012, Clostridium thermocellum ATCC 27405, complete genome) that resulted in the production of ethanol at high yields.

[0099] Tannler S et al [Metab Eng. 2008 September; 10(5):216-26], teaches enhanced ethanol production in bacteria by down-regulating expression of the gluconeogenic genes gapB and pckA (examples of sequences of each can be found in refseq accession no: NC_{—}000964, Bacillus subtilis subsp. subtilis str. 168, complete genome) through knockout of their genetic repressor CcpN.

[0100] The present invention also contemplates the down-regulation of genes whose knockout enhanced the production of hydrogen as a biofuel.

[0101] Vardar-Schara et al [Microbial Biotechnology Vol 1, Issue 2, Pages 107-125], incorporated herein by reference, teaches a number of strains of genetically engineered bacteria which generate hydrogen. Vardar-Schara et al states therein, that the hydrogen yield is suboptimal in a number of those strains due to the presence of uptake hydrogenases. Accordingly, the present invention contemplates downregulation of these uptake hydrogenases, Hyd-1 and -2 (hyaB and hybC respectively) for the enhancement of hydrogen production. Examples of sequences of each can be found in refseq accession no: NC_{—}011742, Escherichia coli S88, complete genome.

[0102] In addition, the present invention contemplates down-regulation of genes of metabolic pathways that compete for hydrogen production.

[0103] Exemplary genes that may be down-regulated to increase hydrogen production in bacteria include, but are not limited to lactate dehydrogenase (ldhA), the FHL repressor (hycA), fumarate reductase (frdBC), the Tat system (tatA-E), the alpha subunit of the formate dehydrogenase-N and -O (fdnG and fdoG respectively), the alpha subunit of nitrate reductase A (narG), pyruvate dehydrogenase (aceE), pyruvate oxidase (poxB) and proteins that transport formate (focA and focB)—see Vardar-Schara et al [Microbial Biotechnology Vol 1, Issue 2, Pages 107-125]. Examples of sequences of each can be found in refseq accession no: NC_{—}011742, Escherichia coli S88, complete genome.

[0104] Lactic Acid Bacteria (LAB) play an essential role in the preservation, taste and texture of cheese, yogurt, sausage, sauerkraut and a large variety of traditional indigenous fermented foods. Down-regulation of such genes would ensure for example that lactic acid bacteria used in the food industry would have a better taste or smell. According to another embodiment, the genes that are down-regulated in bacteria are those which are involved in taste or odor.

[0105] For example, the buttermilk aroma diacetyl is formed from the carbon metabolism of dairy Lactococcus bacteria during buttermilk fermentation. Lactococcal strains that have low levels of a diacetyl reductase, acetoin reductase and butanediol dehydrogenase have been found to produce more diacetyl. Down-regulation of such enzymes would therefore be beneficial. Examples of sequences of each can be found in refseq accession no: NC_{—}009004, Lactococcus lactis subsp. cremoris MG1363.

[0106] For example, down-regulation of those Lactobacillus bulgaricus genes associated with lactic acid production would be beneficial for the generation of mild forms of yoghurt.

[0107] As used herein, the expression “lactic acid bacterium” refers to a group of gram-positive, microaerophilic or anaerobic bacteria having in common the ability to ferment sugars and citrate with the production of acids including lactic acid as the predominantly produced acid, acetic acid, formic acid and propionic acid. The industrially most useful lactic acid bacteria are found among Lactococcus species, Streptococcus species, Lactobacillus species, Leuconostoc species, Oenococcus species and Pediococcus species. In the dairy industry, the strict anaerobes belonging to the genus Bifidobacterium is generally included in the group of lactic acid bacteria as these organisms also produce lactic acid and are used as starter cultures in the production of dairy products.

[0108] It will be appreciated that the present invention may be used to enhance production of any industrial, agricultural, pharmaceutical (e.g. recombinant protein production) product in bacteria by suppressing genes associated with lower levels of expression of that industrial product.

[0109] Other examples of bacterial genes that may be downregulated according to the method of this aspect of the present invention are genes that if down-regulated would aid in the treatment of a bacterial infection. Such genes include for example, antibiotic resistance genes, bacterial virulence genes and genes that are essential for the growth of bacteria.

[0110] The phrase “antibiotic resistance genes” as used herein refers to genes that confer resistance to antibiotics, for example by coding for enzymes which destroy it, by coding for surface proteins which prevent it from entering the microorganism, or by being a mutant form of the antibiotic's target so that it can ignore it.

[0111] Example of antibiotic resistance genes may be found on the ARDB—Antibiotic Resistance Genes Database—www.ardbdotcbcbdotumddotedu/. Particular examples of antibiotic resistance genes include, but are not limited to methicillin resistance gene or a vancomycin resistance gene.

[0112] The phrase “virulence gene” as used herein refers to a nucleic acid sequence of a microorganism, the presence and/or expression of which correlates with the pathogenicity of the microorganism. In the case of bacteria, such virulence genes may in an embodiment comprise chromosomal genes (i.e. derived from a bacterial chromosome), or in a further embodiment comprise a non-chromosomal gene (i.e. derived from a bacterial non-chromosomal nucleic acid source, such as a plasmid). In the case of E. coli, examples of virulence genes and classes of polypeptides encoded by such genes are described below. Virulence genes for a variety of pathogenic microorganisms are known in the art.

[0113] Examples of virulence genes include, but are not limited to genes encoding toxins, hemolysins, fimbrial and afimbrial adhesins, cytotoxic factors, microcins and colicins and also those identified in Sun et al., Nature medicine, 2000; 6(11): 1269-1273.

[0114] According to one embodiment of the invention, the bacterial virulence gene may be selected from the group consisting of actA (example is given in genebank accession no: NC_{—}003210.1), Tem (example is given in genebank accession no: NC_{—}009980), Shv (example is given in genebank accession no: NC_{—}009648), oxa-1 (example is given in genebank accession no: NW_{—}139440), oxa-7 (example is given in genebank accession no: X75562), pse-4 (example is given in genebank accession no: J05162), ctx-m (example is given in genebank accession no: NC_{—}010870), ant(3″)-Ia (aadA1) (example is given in genebank accession no: DQ489717), ant(2″)-Ia (aadB)b (example is given in genebank accession no: DQ176450), aac(3)-IIa (aacC2) (example is given in genebank accession no: NC_{—}010886), aac(3)-IV (example is given in genebank accession no: DQ241380), aph(3′)-Ia (aphA1) (example is given in genebank accession no: NC_{—}007682), aph(3′)-IIa (aphA2) (example is given in genebank accession no: NC_{—}010170), tet(A) (example is given in genebank accession no: NC_{—}005327), tet(B) (example is given in genebank accession no: FJ411076), tet(C) (example is given in genebank accession no: NC_{—}010558), tet(D) (example is given in genebank accession no: NC_{—}010558), tet(E) (example is given in genebank accession no: M34933), tet(Y) (example is given in genebank accession no: AB089608), catI (example is given in genebank accession no: NC_{—}005773), catII NC_{—}010119, catIII (example is given in genebank accession no: X07848), floR (example is given in genebank accession no: NC_{—}009140), dhfrI (example is given in genebank accession no: NC_{—}002525), dhfrV (example is given in genebank accession no: NC_{—}010488), dhfrVII (example is given in genebank accession no: DQ388126), dhfrIX (example is given in genebank accession no: NC_{—}010410), dhfrXIII (example is given in genebank accession no: NC_{—}000962), dhfrXV (example is given in genebank accession no: Z83311), suII (example is given in genebank accession no: NC_{—}000913), suIII (example is given in genebank accession no: NC_{—}000913), integron class 1 3′-CS (example is given in genebank accession no: AJ867812), vat (example is given in genebank accession no: NC_{—}011742), vatC (example is given in genebank accession no: AF015628), vatD (example is given in genebank accession no: AF368302), vatE (example is given in genebank accession no: NC_{—}004566), vga (example is given in genebank accession no: AF117259), vgb (example is given in genebank accession no: AF117258), and vgbB (example is given in genebank accession no: AF015628).

[0115] As mentioned, in order to kill various pathogenic bacteria, CRISPR could be used in order to silence essential genes (i.e., compatible with life) in the bacteria. Essential genes could be identified by their conservation among several pathogens (Payne et al, Nature Reviews Drug Discovery 6, 29-40 (January 2007)). Such genes include ribosomal RNA genes (16S and 23S), ribosomal protein genes, tRNA-synthetases, as well as additional genes shown to be essential such as dnaB, fabI, folA, gyrB, murA, pytH, metG, and tufA(B) NC_{—}009641 for Staphylococcus aureus subsp. aureus str. Newman and NC_{—}003485 for Streptococcus pyogenes MGAS8232 (DeVito et al, Nature Biotechnology 20, 478-483 (2002)).

[0116] As mentioned, the present invention teaches a method of down-regulating a gene (or genes) in a prokaryotic cell.

[0117] Examples of prokaryotic cells include, but are not limited to bacterial cells and archaeal cells (e.g. those belonging to the two main phyla, the Euryarchaeota and Crenarchaeota).

[0118] The bacteria whose genes may be down-regulated may be gram positive or gram negative bacteria. The bacteria may also be photosynthetic bacteria (e.g. cyanobacteria).

[0119] The term “Gram-positive bacteria” as used herein refers to bacteria characterized by having as part of their cell wall structure peptidoglycan as well as polysaccharides and/or teichoic acids and are characterized by their blue-violet color reaction in the Gram-staining procedure. Representative Gram-positive bacteria include: Actinomyces spp., Bacillus anthracis, Bifidobacterium spp., Clostridium botulinum, Clostridium perfringens, Clostridium spp., Clostridium tetani, Corynebacterium diphtheriae, Corynebacterium jeikeium, Enterococcus faecalis, Enterococcus faecium, Erysipelothrix rhusiopathiae, Eubacterium spp., Gardnerella vaginalis, Gemella morbillorum, Leuconostoc spp., Mycobacterium abcessus, Mycobacterium avium complex, Mycobacterium chelonae, Mycobacterium fortuitum, Mycobacterium haemophilium, Mycobacterium kansasii, Mycobacterium leprae, Mycobacterium marinum, Mycobacterium scrofulaceum, Mycobacterium smegmatis, Mycobacterium terrae, Mycobacterium tuberculosis, Mycobacterium ulcerans, Nocardia spp., Peptococcus niger, Peptostreptococcus spp., Proprionibacterium spp., Staphylococcus aureus, Staphylococcus auricularis, Staphylococcus capitis, Staphylococcus cohnii, Staphylococcus epidermidis, Staphylococcus haemolyticus, Staphylococcus hominis, Staphylococcus lugdanensis, Staphylococcus saccharolyticus, Staphylococcus saprophyticus, Staphylococcus schleiferi, Staphylococcus similans, Staphylococcus warneri, Staphylococcus xylosus, Streptococcus agalactiae (group B streptococcus), Streptococcus anginosus, Streptococcus bovis, Streptococcus canis, Streptococcus equi, Streptococcus milleri, Streptococcus mitior, Streptococcus mutans, Streptococcus pneumoniae, Streptococcus pyogenes (group A streptococcus), Streptococcus salivarius, Streptococcus sanguis.

[0120] The term “Gram-negative bacteria” as used herein refer to bacteria characterized by the presence of a double membrane surrounding each bacterial cell. Representative Gram-negative bacteria include Acinetobacter calcoaceticus, Actinobacillus actinomycetemcomitans, Aeromonas hydrophila, Alcaligenes xylosoxidans, Bacteroides, Bacteroides fragilis, Bartonella bacilliformis, Bordetella spp., Borrelia burgdorferi, Branhamella catarrhalis, Brucella spp., Campylobacter spp., Chalmydia pneumoniae, Chlamydia psittaci, Chlamydia trachomatis, Chromobacterium violaceum, Citrobacter spp., Eikenella corrodens, Enterobacter aerogenes, Escherichia coli, Flavobacterium meningosepticum, Fusobacterium spp., Haemophilus influenzae, Haemophilus spp., Helicobacter pylori, Klebsiella spp., Legionella spp., Leptospira spp., Moraxella catarrhalis, Morganella morganii, Mycoplasma pneumoniae, Neisseria gonorrhoeae, Neisseria meningitidis, Pasteurella multocida, Plesiomonas shigelloides, Prevotella spp., Proteus spp., Providencia rettgeri, Pseudomonas aeruginosa, Pseudomonas spp., Rickettsia prowazekii, Rickettsia rickettsii, Rochalimaea spp., Salmonella spp., Salmonella typhi, Serratia marcescens, Shigella spp., Treponema carateum, Treponema pallidum, Treponema pallidum endemicum, Treponema pertenue, Veillonella spp., Vibrio cholerae, Vibrio vulnificus, Yersinia enterocolitica and Yersinia pestis.

[0121] As mentioned, the method of the present invention is effected by introducing into the cell a CRISPR system polynucleotide encoding a CRISPR array and at least one CRISPR associated (CAS) polypeptide of a repeat associated mysterious protein (RAMP) family, wherein a spacer of the CRISPR array is sufficiently complementary with a portion of the gene to down-regulate expression of the gene.

[0122] According to another embodiment the method is effected by introducing into the cell a first polynucleotide which encodes the CRISPR array and a second polynucleotide which encodes at least one Cas polypeptide of the RAMP family.

[0123] Below is a short summary of CRISPR arrays.

[0124] CRISPR (Clustered Regularly Interspaced Short Palindromic Repeats) arrays together with the CAS genes form the CRISPR system.

[0125] CRISPR arrays also known as SPIDRs (SPacer Interspersed Direct Repeats) constitute a family of recently described DNA loci that are usually specific to a particular bacterial species. The CRISPR array is a distinct class of interspersed short sequence repeats (SSRs) that were first recognized in E. coli (Ishino et al, J. Bacteriol., 169:5429-5433). In subsequent years, similar CRISPR arrays were found in Mycobacterium tuberculosis, Haloferax mediterranei, Methanocaldococcus jannaschii, Thermotoga maritima and other bacteria and archaea. The repeats of CRISPR arrays are short elements that occur in clusters that are always regularly spaced by unique intervening sequences with a constant length. Although the repeat sequences are highly conserved between strains, the number of interspersed repeats and the sequences of the spacer regions differ from strain to strain. The repeat sequences are partially palindromic DNA repeats typically of 24 to 47 bp, containing inner and terminal inverted repeats of up to 11 bp. These repeats have been reported to occur from 1 to 382 times. Although isolated elements have been detected, they are generally arranged in clusters (up to about 20 or more per genome) of repeated units spaced by unique intervening 26-72 bp sequences.

[0126] As used herein, the phrase “CRISPR array polynucleotide” refers to a DNA or RNA segment which comprises sufficient CRISPR repeats such that it is capable of downregulating a complementary gene.

[0127] According to one embodiment, the CRISPR array polynucleotide comprises at least 2 repeats with 1 spacer between them.

[0128] According to another embodiment, the CRISPR array polynucleotide comprises at least 4 repeats with spacers inbetween each.

[0129] According to still another embodiment, at least one, at least two, at least three, at least four of the spacers of the CRISPR array polynucleotide are the native sequences of the array.

[0130] According to one embodiment, the CRISPR array polynucleotide comprises at least 1 spacer flanked on the 5′ end by 4-10 bases from the 3′ end of the repeat.

[0131] In an exemplary embodiment, the CRISPR array polynucleotide comprises all of the CRISPR repeats, starting with the first nucleotide of the first CRISPR repeat and ending with the last nucleotide of the last (terminal) repeat.

[0132] Various computer software and web resources are available for the analysis of and identification of CRISPR systems and therefore CRISPR arrays. These tools include software for CRISPR detection, such as PILERCR, CRISPR Recognition Tool and CRISPRFinder; online repositories of pre-analyzed CRISPRs, such as CRISPRdb; and tools for browsing CRISPRs in microbial genomes, such as Pygram. Databases for CRISPR systems include: www.crisprdotu-psuddotfr/crispr/CRISPRHomePagedotphp.

[0133] It has been revealed that CRISPR systems are found in approximately 40% and 90% of sequenced bacterial and archaeal genomes, respectively, and the present inventor contemplates the use of CRISPR arrays from all such CRISPR systems that target RNA.

[0134] According to one embodiment, the CRISPR array polynucleotide comprises a nucleic acid sequence which, apart from the spacer, (or spacers) which is replaced so as to down-regulate the gene of interest, is 100% homologous to the naturally occurring (wild-type) sequence.

[0135] According to another embodiment, the CRISPR array polynucleotide comprises a nucleic acid sequence which, apart from the spacer, (or spacers) which is replaced so as to down-regulate a gene of interest, is 99% homologous to the naturally occurring (wild-type) sequence.

[0136] According to another embodiment, the CRISPR array polynucleotide comprises a nucleic acid sequence which, apart from the spacer, (or spacers) which is replaced so as to down-regulate a gene of interest, is 98% homologous to the naturally occurring (wild-type) sequence.

[0137] According to another embodiment, the CRISPR array polynucleotide comprises a nucleic acid sequence which, apart from the spacer, (or spacers) which is replaced so as to down-regulate a gene of interest, is 97% homologous to the naturally occurring (wild-type) sequence.

[0138] According to another embodiment, the CRISPR array polynucleotide comprises a nucleic acid sequence which, apart from the spacer, (or spacers) which is replaced so as to down-regulate a gene of interest, is 96% homologous to the naturally occurring (wild-type) sequence.

[0139] According to another embodiment, the CRISPR array polynucleotide comprises a nucleic acid sequence which, apart from the spacer, (or spacers) which is replaced so as to down-regulate a gene of interest, is 95% homologous to the naturally occurring (wild-type) sequence.

[0140] According to one embodiment, the CRISPR array polynucleotide comprises a nucleic acid sequence which, apart from the spacer, (or spacers) which is replaced so as to down-regulate a gene of interest, is 90% homologous to the naturally occurring (wild-type) sequence.

[0141] According to one embodiment, the CRISPR array polynucleotide comprises a nucleic acid sequence which, apart from the spacer, (or spacers) which is replaced so as to down-regulate a gene of interest, is 80% homologous to the naturally occurring (wild-type) sequence.

[0142] According to one embodiment, the CRISPR array polynucleotide comprises a nucleic acid sequence which, apart from the spacer, (or spacers) which is replaced so as to down-regulate a gene of interest, is 75% homologous to the naturally occurring (wild-type) sequence.

[0143] According to one embodiment, the CRISPR array polynucleotide comprises a nucleic acid sequence which, apart from the spacer, (or spacers) which is replaced so as to down-regulate a gene of interest, is 70% homologous to the naturally occurring (wild-type) sequence.

[0144] According to one embodiment, the CRISPR array polynucleotide comprises a nucleic acid sequence which, apart from the spacer, (or spacers) which is replaced so as to down-regulate a gene of interest, is 65% homologous to the naturally occurring (wild-type) sequence.

[0145] According to one embodiment, the CRISPR array polynucleotide comprises a nucleic acid sequence which, apart from the spacer, (or spacers) which is replaced so as to down-regulate a gene of interest, is 60% homologous to the naturally occurring (wild-type) sequence.

[0146] The present invention contemplates modification of the CRISPR system polynucleotide sequence such that the codon usage is optimized for the organism in which it is being introduced (e.g. E. coli).

[0147] Thus for example Cas6 polynucleotide sequence derived from Neisseria sicca codon optimized for use in E. coli is set forth in SEQ ID NO: 1361. A Cmr 1 polynucleotide sequence derived from Neisseria sicca codon optimized for use in E. coli is set forth in SEQ ID NO: 1362. A Cmr2 polynucleotide sequence derived from Neisseria sicca codon optimized for use in E. coli is set forth in SEQ ID NO: 1363. A Cmr3 polynucleotide sequence derived from Neisseria sicca codon optimized for use in E. coli is set forth in SEQ ID NO: 1364. A Cmr4 polynucleotide sequence derived from Neisseria sicca codon optimized for use in E. coli is set forth in SEQ ID NO: 1365. A Cmr5 polynucleotide sequence derived from Neisseria sicca codon optimized for use in E. coli is set forth in SEQ ID NO: 1366. A Cmr6 polynucleotide sequence derived from Neisseria sicca codon optimized for use in E. coli is set forth in SEQ ID NO: 1367.

[0148] Contemplated CRISPR systems that may be used according to this aspect of the present invention include, but are not limited to the CRISPR systems which encode at least one CRISPR associated (CAS) polypeptide of a repeat associated mysterious protein (RAMP) family.

[0149] As used herein, the term “cas gene” refers to the genes that are generally coupled, associated or close to or in the vicinity of flanking CRISPR arrays that encode CAS proteins.

[0150] According to one embodiment the cas gene is defined as such in one of the TIGRFAM profiles that were defined in [Haft et al, PLoS Comput Biol. 1, e60, 2005].

[0151] Preferably, a cas gene comprises at least 50%, more preferably at least 65%, more preferably at least 80%, more preferably at least 85%, more preferably at least 90%, more preferably at least 95%, more preferably at least 96%, more preferably at least 97%, more preferably at least 98%, most preferably at least 99% of the wild-type sequence. Preferably, a cas gene retains 50%, more preferably 60%, more preferably 70%, more preferably 80%, more preferably 85%, more preferably 90%, more preferably 95%, more preferably 96%, more preferably 97%, more preferably 98%, or most preferably 99% activity of the wild-type polypeptide or nucleotide sequence.

[0152] CRISPR arrays are typically found in the vicinity of four genes named cas1 to cas4. The most common arrangement of these genes is cas3-cas4-cas 1-cas2. The Cas3 protein appears to be a helicase, whereas Cas4 resembles the RecB family of exonucleases and contains a cysteine-rich motif, suggestive of DNA binding. The cas1 gene (NCBI COGs database code: COG1518) is especially noteworthy, as it serves as a universal marker of the CRISPR system (linked to all CRISPR systems except for that of Pyrococcus abyssii). Cas2 remains to be characterized cas1-4 are typically characterized by their close proximity to the CRISPR loci and their broad distribution across bacterial and archaeal species. Although not all cas1-4 genes associate with all CRISPR loci, they are all found in multiple subtypes.

[0153] In addition, there is another cluster of three genes associated with CRISPR structures in many bacterial species, referred to herein as cas1 B, cas5 and cas6; (See, [Barrangou et al, 2007, Science 315(5819): 1709-12]). In some embodiments, the cas gene is selected from cas1, cas2, cas3, cas4, cas IB, cas5 and/or cas6, fragments, variants, homologues and/or derivatives thereof. In some additional embodiments, a combination of two or more cas genes find use, including any suitable combinations, including those provided in WO 07/025097, incorporated herein by reference.

[0154] In some embodiments, the cas genes comprise DNA, while in other embodiments, the cas comprise RNA. In some embodiments, the nucleic acid is of genomic origin, while in other embodiments, it is of synthetic or recombinant origin. In some embodiments, the cas genes are double-stranded or single-stranded whether representing the sense or antisense strand or combinations thereof.

[0155] In some embodiments it is preferred that the cas gene is the cas gene that is closest to the leader sequence or the first CRISPR repeat at the 5′ end of the CRISPR locus—such as cas4 or cas6.

[0156] Exemplary CAS polypeptides of the RAMP subtype include Csm3-5, Cmr1, Cmr2, Cmr3, Cmr4, Cmr6 and Csx7.

[0157] Exemplary cas gene sequences of the RAMP subtype are set forth in SEQ ID NOs: 1-1339.

[0158] According to a specific embodiment, the CRISPR system encodes at least a Cas6 and the six gene operon Cmr1-Cmr6 of the Neisseria sicca bacteria. The CRISPR system may further encode Cas1 and Cas2 of the Neisseria sicca bacteria.

[0159] According to one embodiment, the CRISPR system polynucleotide sequence encodes at least 2, at least 3, at least 4, at least 5, at least 6, at least 7 or all the CAS polypeptides of the RAMP family.

[0160] According to another embodiment, the CRISPR system polynucleotide sequence encodes a combination of cas polypeptides that is found to be naturally occurring, wherein at least one cas polypeptide belongs to the RAMP subtype. Such a combination is referred to herein as a RAMP module.

[0161] Examples of CRISPR systems of the RAMP module are detailed in Table 1 in the Examples section herein below.

[0162] It will be appreciated that a given set of cas genes or proteins is typically associated with a given repeated sequence within a particular CRISPR array. Thus, cas genes appear to be specific for a given DNA repeat (i.e., cas genes and the repeated sequence form a functional pair).

[0163] Thus, for example if the CRISPR array which is used to downregulate a gene comprises the same repeat sequences as the CRISPR array from the Myxococcus xanthus DK 1622 RAMP module CRISPR system, then the cas genes that may also be comprised in the polynucleotide may be those from the Myxococcus xanthus DK 1622 CRISPR system. According to one embodiment, the same number of cas genes are added to the polynucleotide as the number of cas genes that appear in the original system. According to another embodiment, at least one of the cas genes that appears in the original system is added to the polynucleotide.

[0164] Thus for example, cas genes that appear in the Myxococcus xanthus DK 1622 RAMP module CRISPR system include Cas6 (SEQ ID NO: 2), cmr6 SEQ ID NO: 4, cmr5 SEQ ID NO: 6, cmr4 SEQ ID NO: 8, cmr3 SEQ ID NO: 10, cmr2 SEQ ID NO: 12, cmr1 SEQ ID NO: 14, and a putative CRISPR-associated protein SEQ ID NO: 1338. Polynucleotides comprising repeat sequences from the Myxococcus xanthus DK 1622 CRISPR system may therefore preferably comprise at least one of these sequences.

[0165] As another example, Neisseria sicca Cas proteins include the Cas6 protein (SEQ ID NO: 1354), and the six Cmr1-Cmr6 proteins (SEQ ID NOs: 1355, 1356, 1357, 1358, 1359 and 1360). Polynucleotides comprising repeat sequences from Neisseria sicca (e.g. as set forth in SEQ ID NOs:1369, 1373, 1374 or 1375) and the leader sequence from Neisseria sicca (as set forth in SEQ ID NO: 1372) may therefore preferably comprise polynucleotide sequences encoding the above mentioned Cas proteins.

[0166] Typically, once a CRISPR system which encodes at least one cas protein of the RAMP module is identified it may be amplified and isolated.

[0167] Amplification of the CRISPR system may be achieved by any method known in the art, including polymerase chain reaction (PCR). In the present invention, oligonucleotide primers may be designed for use in PCR reactions to amplify all or part of a CRISPR array.

[0168] The term “primer” refers to an oligonucleotide, whether occurring naturally as in a purified restriction digest or produced synthetically, which is capable of acting as a point of initiation of synthesis when placed under conditions in which synthesis of a primer extension product which is complementary to a nucleic acid strand is induced (i.e., in the presence of nucleotides and an inducing agent—such as DNA polymerase and at a suitable temperature and pH). In some embodiments, the primer is single stranded for maximum efficiency in amplification, although in other embodiments, the primer is double stranded. In some embodiments, the primer is an oligodeoxyribonucleotide. The primer must be sufficiently long to prime the synthesis of extension products in the presence of the inducing agent. The exact length of the primers depends on many factors, including temperature, source of primer, and the use of the method. PCR primers are typically at least about 10 nucleotides in length, and most typically at least about 20 nucleotides in length. Methods for designing and conducting PCR are well known in the art, and include, but are not limited to methods using paired primers, nested primers, single specific primers, degenerate primers, gene-specific primers, vector-specific primers, partially mismatched primers, etc.

[0169] Exemplary primers that can amplify the M. xanthus CRISPR array are set forth in SEQ ID NO: 1350 and 1351.

[0170] As mentioned, in order to down-regulate the prokaryotic gene of interest, a spacer of the CRISPR array is replaced with a nucleic acid sequence, the nucleic acid sequence being sufficiently complementary to a portion of the prokaryotic gene.

[0171] As used herein, the term “spacer” refers to a non-repetitive spacer sequence that is found between multiple short direct repeats (i.e., CRISPR repeats) of CRISPR arrays. In some preferred embodiments, CRISPR spacers are located in between two identical CRISPR repeats. In some embodiments, CRISPR spacers are located in between two partial repeats. In some embodiments, CRISPR spacers are identified by sequence analysis at the DNA stretches located in between two CRISPR repeats.

[0172] In some preferred embodiments, CRISPR spacer is naturally present in between two identical, short direct repeats that are palindromic.

[0173] The phrase “portion of a gene” relates to a portion from the coding or non-coding region of the gene.

[0174] The phrase “sufficiently complementary” as used herein, refers to the sequence of the spacer being adequately complementary such that it is capable of downregulating expression of the gene.

[0175] According to one embodiment of this aspect of the present invention, a sequence which is sufficiently complementary to a portion of the prokaryotic gene is one which is at least about 70, about 75, about 80, about 85, or about 90% identical, or at least about 91, about 92, about 93, about 94, about 95, about 96, about 97, about 98, or about 99% identical to the prokaryotic gene. In some preferred embodiments, the sequence is 100% complementary to the prokaryotic gene.

[0176] Assays to test down-regulation of expression are known in the art and may be effected on the RNA or protein level.

[0177] Methods of Detecting the Expression Level of RNA

[0178] The expression level of the RNA in prokarytoic cells can be determined using methods known in the arts.

[0179] Northern Blot Analysis:

[0180] This method involves the detection of a particular RNA in a mixture of RNAs. An RNA sample is denatured by treatment with an agent (e.g., formaldehyde) that prevents hydrogen bonding between base pairs, ensuring that all the RNA molecules have an unfolded, linear conformation. The individual RNA molecules are then separated according to size by gel electrophoresis and transferred to a nitrocellulose or a nylon-based membrane to which the denatured RNAs adhere. The membrane is then exposed to labeled DNA probes. Probes may be labeled using radio-isotopes or enzyme linked nucleotides. Detection may be using autoradiography, colorimetric reaction or chemiluminescence. This method allows both quantitation of an amount of particular RNA molecules and determination of its identity by a relative position on the membrane which is indicative of a migration distance in the gel during electrophoresis.

[0181] RT-PCR Analysis:

[0182] This method uses PCR amplification of relatively rare RNAs molecules. First, RNA molecules are purified from the cells and converted into complementary DNA (cDNA) using a reverse transcriptase enzyme (such as an MMLV-RT) and primers such as, oligo dT, random hexamers or gene specific primers. Then by applying gene specific primers and Taq DNA polymerase, a PCR amplification reaction is carried out in a PCR machine. Those of skills in the art are capable of selecting the length and sequence of the gene specific primers and the PCR conditions (i.e., annealing temperatures, number of cycles and the like) which are suitable for detecting specific RNA molecules. It will be appreciated that a semi-quantitative RT-PCR reaction can be employed by adjusting the number of PCR cycles and comparing the amplification product to known controls.

[0183] RNA In Situ Hybridization Stain:

[0184] In this method DNA or RNA probes are attached to the RNA molecules present in the cells. Generally, the cells are first fixed to microscopic slides to preserve the cellular structure and to prevent the RNA molecules from being degraded and then are subjected to hybridization buffer containing the labeled probe. The hybridization buffer includes reagents such as formamide and salts (e.g., sodium chloride and sodium citrate) which enable specific hybridization of the DNA or RNA probes with their target mRNA molecules in situ while avoiding non-specific binding of probe. Those of skills in the art are capable of adjusting the hybridization conditions (i.e., temperature, concentration of salts and formamide and the like) to specific probes and types of cells. Following hybridization, any unbound probe is washed off and the slide is subjected to either a photographic emulsion which reveals signals generated using radio-labeled probes or to a colorimetric reaction which reveals signals generated using enzyme-linked labeled probes.

[0185] In Situ RT-PCR Stain:

[0186] This method is described in Nuovo G J, et al. [Intracellular localization of polymerase chain reaction (PCR)-amplified hepatitis C cDNA. Am J Surg Pathol. 1993, 17: 683-90] and Komminoth P, et al. [Evaluation of methods for hepatitis C virus detection in archival liver biopsies. Comparison of histology, immunohistochemistry, in situ hybridization, reverse transcriptase polymerase chain reaction (RT-PCR) and in situ RT-PCR. Pathol Res Pract. 1994, 190: 1017-25]. Briefly, the RT-PCR reaction is performed on fixed cells by incorporating labeled nucleotides to the PCR reaction. The reaction is carried on using a specific in situ RT-PCR apparatus such as the laser-capture microdissection PixCell I LCM system available from Arcturus Engineering (Mountainview, Calif.).

[0187] DNA Microarrays/DNA Chips:

[0188] The expression of thousands of genes may be analyzed simultaneously using DNA microarrays, allowing analysis of the complete transcriptional program of an organism during specific developmental processes or physiological responses. DNA microarrays consist of thousands of individual gene sequences attached to closely packed areas on the surface of a support such as a glass microscope slide. Various methods have been developed for preparing DNA microarrays. In one method, an approximately 1 kilobase segment of the coding region of each gene for analysis is individually PCR amplified. A robotic apparatus is employed to apply each amplified DNA sample to closely spaced zones on the surface of a glass microscope slide, which is subsequently processed by thermal and chemical treatment to bind the DNA sequences to the surface of the support and denature them. Typically, such arrays are about 2×2 cm and contain about individual nucleic acids 6000 spots. In a variant of the technique, multiple DNA oligonucleotides, usually 20 nucleotides in length, are synthesized from an initial nucleotide that is covalently bound to the surface of a support, such that tens of thousands of identical oligonucleotides are synthesized in a small square zone on the surface of the support. Multiple oligonucleotide sequences from a single gene are synthesized in neighboring regions of the slide for analysis of expression of that gene. Hence, thousands of genes can be represented on one glass slide. Such arrays of synthetic oligonucleotides may be referred to in the art as “DNA chips”, as opposed to “DNA microarrays”, as described above [Lodish et al. (eds.). Chapter 7.8: DNA Microarrays: Analyzing Genome-Wide Expression. In: Molecular Cell Biology, 4th ed., W. H. Freeman, New York. (2000)].

[0189] Oligonucleotide Microarray—

[0190] In this method oligonucleotide probes capable of specifically hybridizing with the polynucleotides of the present invention are attached to a solid surface (e.g., a glass wafer). Each oligonucleotide probe is of approximately 20-25 nucleic acids in length. To detect the expression pattern of the polynucleotides of the present invention in a specific cell sample (e.g., blood cells), RNA is extracted from the cell sample using methods known in the art (using e.g., a TRIZOL solution, Gibco BRL, USA). Hybridization can take place using either labeled oligonucleotide probes (e.g., 5′-biotinylated probes) or labeled fragments of complementary DNA (cDNA) or RNA (cRNA). Briefly, double stranded cDNA is prepared from the RNA using reverse transcriptase (RT) (e.g., Superscript II RT), DNA ligase and DNA polymerase I, all according to manufacturer's instructions (Invitrogen Life Technologies, Frederick, Md., USA). To prepare labeled cRNA, the double stranded cDNA is subjected to an in vitro transcription reaction in the presence of biotinylated nucleotides using e.g., the BioArray High Yield RNA Transcript Labeling Kit (Enzo, Diagnostics, Affymetix Santa Clara Calif.). For efficient hybridization the labeled cRNA can be fragmented by incubating the RNA in 40 mM Tris Acetate (pH 8.1), 100 mM potassium acetate and 30 mM magnesium acetate for 35 minutes at 94° C. Following hybridization, the microarray is washed and the hybridization signal is scanned using a confocal laser fluorescence scanner which measures fluorescence intensity emitted by the labeled cRNA bound to the probe arrays.

[0191] For example, in the Affymetrix microarray (Affymetrix®, Santa Clara, Calif.) each gene on the array is represented by a series of different oligonucleotide probes, of which, each probe pair consists of a perfect match oligonucleotide and a mismatch oligonucleotide. While the perfect match probe has a sequence exactly complimentary to the particular gene, thus enabling the measurement of the level of expression of the particular gene, the mismatch probe differs from the perfect match probe by a single base substitution at the center base position. The hybridization signal is scanned using the Agilent scanner, and the Microarray Suite software subtracts the non-specific signal resulting from the mismatch probe from the signal resulting from the perfect match probe.

[0192] Methods of Detecting Expression and/or Activity of Proteins

[0193] Expression and/or activity level of proteins expressed in prokaryotic cells can be determined using methods known in the arts.

[0194] Enzyme Linked Immunosorbent Assay (ELISA):

[0195] This method involves fixation of a sample (e.g., fixed cells or a proteinaceous solution) containing a protein substrate to a surface such as a well of a microtiter plate. A substrate specific antibody coupled to an enzyme is applied and allowed to bind to the substrate. Presence of the antibody is then detected and quantitated by a colorimetric reaction employing the enzyme coupled to the antibody. Enzymes commonly employed in this method include horseradish peroxidase and alkaline phosphatase. If well calibrated and within the linear range of response, the amount of substrate present in the sample is proportional to the amount of color produced. A substrate standard is generally employed to improve quantitative accuracy.

[0196] Western Blot:

[0197] This method involves separation of a substrate from other protein by means of an acrylamide gel followed by transfer of the substrate to a membrane (e.g., nylon or PVDF). Presence of the substrate is then detected by antibodies specific to the substrate, which are in turn detected by antibody binding reagents. Antibody binding reagents may be, for example, protein A, or other antibodies. Antibody binding reagents may be radiolabeled or enzyme linked as described hereinabove. Detection may be by autoradiography, colorimetric reaction or chemiluminescence. This method allows both quantitation of an amount of substrate and determination of its identity by a relative position on the membrane which is indicative of a migration distance in the acrylamide gel during electrophoresis.

[0198] Radio-Immunoassay (RIA):

[0199] In one version, this method involves precipitation of the desired protein (i.e., the substrate) with a specific antibody and radiolabeled antibody binding protein (e.g., protein A labeled with I¹²⁵) immobilized on a precipitable carrier such as agarose beads. The number of counts in the precipitated pellet is proportional to the amount of substrate.

[0200] In an alternate version of the RIA, a labeled substrate and an unlabelled antibody binding protein are employed. A sample containing an unknown amount of substrate is added in varying amounts. The decrease in precipitated counts from the labeled substrate is proportional to the amount of substrate in the added sample.

[0201] Fluorescence Activated Cell Sorting (FACS):

[0202] This method involves detection of a substrate in situ in cells by substrate specific antibodies. The substrate specific antibodies are linked to fluorophores. Detection is by means of a cell sorting machine which reads the wavelength of light emitted from each cell as it passes through a light beam. This method may employ two or more antibodies simultaneously.

[0203] Immunohistochemical Analysis:

[0204] This method involves detection of a substrate in situ in fixed cells by substrate specific antibodies. The substrate specific antibodies may be enzyme linked or linked to fluorophores. Detection is by microscopy and subjective or automatic evaluation. If enzyme linked antibodies are employed, a colorimetric reaction may be required. It will be appreciated that immunohistochemistry is often followed by counterstaining of the cell nuclei using for example Hematoxyline or Giemsa stain.

[0205] In Situ Activity Assay:

[0206] According to this method, a chromogenic substrate is applied on the cells containing an active enzyme and the enzyme catalyzes a reaction in which the substrate is decomposed to produce a chromogenic product visible by a light or a fluorescent microscope.

[0207] In Vitro Activity Assays:

[0208] In these methods the activity of a particular enzyme is measured in a protein mixture extracted from the cells. The activity can be measured in a spectrophotometer well using colorimetric methods or can be measured in a non-denaturing acrylamide gel (i.e., activity gel). Following electrophoresis the gel is soaked in a solution containing a substrate and colorimetric reagents. The resulting stained band corresponds to the enzymatic activity of the protein of interest. If well calibrated and within the linear range of response, the amount of enzyme present in the sample is proportional to the amount of color produced. An enzyme standard is generally employed to improve quantitative accuracy.

[0209] According to one embodiment, the spacer which is replaced has the same number of base pairs as the “replacing spacer” i.e. the one that is complementary to the prokaryotic gene.

[0210] According to another embodiment, at least two spacers of the CRISPR are replaced with a nucleic acid sequence, each nucleic acid sequence being sufficiently complementary to opposite strands of the gene.

[0211] The present inventor envisages that it is possible to replace any number of the spacers of the wild-type CRISPR.

[0212] The replacement spacers may target the same gene or a number of different genes. According to one embodiment, at least about 10% of the spacers are exchanged for a replacing spacer. According to another embodiment, at least about 20% of the spacers are exchanged for a replacing spacer. According to another embodiment, at least about 30% of the spacers are exchanged for a replacing spacer. According to another embodiment, at least about 40% of the spacers are exchanged for a replacing spacer. According to another embodiment, at least about 50% of the spacers are exchanged for a replacing spacer. According to another embodiment, at least about 60% of the spacers are exchanged for a replacing spacer. According to another embodiment, at least about 70% of the spacers are exchanged for a replacing spacer. According to another embodiment, at least about 80% of the spacers are exchanged for a replacing spacer. According to another embodiment, at least about 90% of the spacers are exchanged for a replacing spacer. According to still another embodiment, about 100% of the spacers are exchanged for a replacing spacer.

[0213] According to one embodiment, at least one of the replaced spacers in the CRISPR array of the present invention is the one which is at the most 5′ end of the array.

[0214] It will be appreciated that the polynucleotide which comprises the modified CRISPR array of the present invention may also comprise other sequences.

[0215] Thus, for example, the modified CRISPR array of the present invention may also comprise a leader sequence 5′ to the array.

[0216] The CRISPR leader is a conserved DNA segment of defined size which is located immediately upstream of the first repeat.

[0217] The leader sequence can be of a different length in different bacteria. In some embodiments, the leader sequence is at least about 20, about 25, about 30, about 35, about 40, about 45, about 50, about 55, about 60, about 65, about 70, about 75, about 80, about 85, about 90, about 95, about 100, about 200, about 300, about 400, or about 500 or more nucleotides in length.

[0218] According to one embodiment, the leader sequence is directly 5′ to the array with no intervening base pairs.

[0219] According to another embodiment the leader sequence is the same leader sequence found in the wild type CRISPR system.

[0220] Thus, for example if the CRISPR array that is introduced into the prokaryotic cell is derived from the Myxococcus xanthus DK 1622 CRISPR system of the RAMP module, then the leader sequence is that leader sequence that is found in the wild-type Myxococcus xanthus DK 1622 CRISPR system of the RAMP module.

[0221] Alternatively, if the CRISPR array that is introduced into the prokaryotic cell is derived from the Neisseria sicca CRISPR system of the RAMP module, then the leader sequence is that leader sequence that is found in the wild-type Neisseria sicca CRISPR system of the RAMP module (e.g. as set forth in SEQ ID NO: 1372).

[0222] According to an exemplary embodiment, where a prokaryotic cell already comprises a CRISPR system, the CRISPR array polynucleotide which is introduced into the cell comprises the identical CRISPR array repeat sequence which is endogenous to that bacteria (it does not necessarily have to have an array of the same size). Accordingly, the choice of CRISPR array that is introduced into a cell is mainly dependent on the prokaryote whose gene or genes are being down-regulated.

[0223] In the case where the prokaryotic cell does not comprise a CRISPR system it will be appreciated that any CRISPR array may be introduced into the cell. According to this embodiment, the other components which make up the CRISPR system are also introduced into the cell. Such components typically match the CRISPR array (i.e. originate from the same CRISPR system). The other components may be introduced into the cell (together with a non-modified, native spacer, or on their own) prior to administration of the CRISPR array with the modified spacer. Alternatively, the other components may be introduced into the cell concommitant with (on the same or on a separate vector) the CRISPR array with the modified spacer.

[0224] Typically, the polynucleotides of the present invention are inserted into nucleic acid constructs so that they are capable of being expressed and propagated in bacterial cells.

[0225] Such nucleic acid constructs typically comprise a prokaryotic origin of replication and other elements which drive the expression of the CRISPR array and associated cas genes.

[0226] Preferably, the promoter utilized by the nucleic acid construct of the present invention is active in the specific cell population transformed.

[0227] Constitutive promoters suitable for use with the present invention are promoter sequences which are active under most environmental conditions and most types of cells such as the cytomegalovirus (CMV) and Rous sarcoma virus (RSV).

[0228] According to one embodiment, the promoter is an inducible promoter, i.e., a promoter that induces the CRISPR expression only in a certain condition (e.g. heat-induced promoter) or in the presence of a certain substance (e.g., promoters induced by Arabinose, Lactose, IPTG etc).

[0229] Examples of bacterial constructs include the pET series of E. coli expression vectors [Studier et al. (1990) Methods in Enzymol. 185:60-89).

[0230] Additional nucleic acid constructs contemplated by the present inventors are those that are engineered such any spacer of choice can be inserted (using a simple blunt-end or sticky end ligation) between two repeat sequences (as exemplified in FIG. 17). This construct comprises at its minimum at least two repeats originating from a CRISPR system of the RAMP module. According to a specific embodiment the two repeats are concatenated (i.e. without an intermediate spacer sequence) which on joining make a unique restriction site there between. On cleavage, the insertion of any spacer to the CRISPR array may be effected using ligation.

[0231] The nucleic acid construct may optionally comprise a leader sequence upstream of the first repeat originating from the CRISPR system of the RAMP module.

[0232] In addition, the construct may comprise spacer sequences on one or both sides of the repeat sequences, as illustrated in FIG. 17.

[0233] Methods of introducing the polynucleotides of the present invention into prokaryotic cells are well known in the art—these include, but are not limited to, transforming with a recombinant bacteriophage DNA, plasmid DNA or cosmid DNA expression vector containing the CRISPR array sequence.

[0234] It will be appreciated that downregulating bacterial genes that are essential or vital to bacterial functioning may be used as a method for treating a bacterial infection. Similarly, downregulating bacterial genes that are associated with bacterial virulence may also be used as a method for treating a bacterial infection.

[0235] Thus, according to another aspect of the present invention, there is provided a method of treating a bacterial infection in a subject in need thereof, the method comprising administering to the subject a therapeutically effective amount of an isolated polynucleotide, comprising a clustered, regularly interspaced short palindromic repeat (CRISPR) array nucleic acid sequence wherein at least one spacer of the CRISPR is sufficiently complementary to a portion of at least one bacterial gene so as to down-regulate expression of the bacterial gene, the bacterial gene being a vital bacterial gene or a bacterial virulence gene, thereby treating the bacterial infection.

[0236] As used herein, the term “treating” includes abrogating, substantially inhibiting, slowing or reversing the progression of a condition, substantially ameliorating clinical or aesthetical symptoms of a condition or substantially preventing the appearance of clinical or aesthetical symptoms of a condition.

[0237] The phrase “bacterial infection” as used herein, refers the invasion and colonization of bacteria in a bodily tissue producing subsequent tissue injury and disease.

[0238] The bacterial infection may be on the body surface, localized (e.g., contained within an organ, at a site of a surgical wound or other wound, within an abscess), or may be systemic (e.g., the subject is bacteremic, e.g., suffers from sepsis). Of particular interest is the treatment of bacterial infections that are amenable to therapy by topical application of the phage of the invention. Also of particular interest is the treatment of bacterial infections that are present in an abscess or are otherwise contained at a site to which the phage of the invention can be administered directly.

[0239] The present invention also contemplates coating of surfaces other than body surfaces with the constructs of the present invention. U.S. Pat. No. 6,627,215 teaches coating of wound dressings with nucleic acids that comprise anti-bacterial activity. U.S. Pat. No. 6,617,142 teaches methods for attaching DNA or RNA to medical device surfaces.

[0240] Contacting a surface with the constructs can be effected using any method known in the art including spraying, spreading, wetting, immersing, dipping, painting, ultrasonic welding, welding, bonding or adhering. The peptides of the present invention may be attached as monolayers or multiple layers.

[0241] The present invention coating a wide variety of surfaces with the constructs of the present invention including fabrics, fibers, foams, films, concretes, masonries, glass, metals, plastics, polymers, and like.

[0242] An exemplary solid surface that may be coated with the peptides of the present invention is an intracorporial or extra-corporial medical device or implant.

[0243] An “implant” as used herein refers to any object intended for placement in a human body that is not a living tissue. The implant may be temporary or permanent. Implants include naturally derived objects that have been processed so that their living tissues have been devitalized. As an example, bone grafts can be processed so that their living cells are removed (acellularized), but so that their shape is retained to serve as a template for ingrowth of bone from a host. As another example, naturally occurring coral can be processed to yield hydroxyapatite preparations that can be applied to the body for certain orthopedic and dental therapies. An implant can also be an article comprising artificial components.

[0244] Thus, for example, the present invention therefore envisions coating vascular stents with the peptides of the present invention. Another possible application of the peptides of the present invention is the coating of surfaces found in the medical and dental environment.

[0245] Surfaces found in medical environments include the inner and outer aspects of various instruments and devices, whether disposable or intended for repeated uses. Examples include the entire spectrum of articles adapted for medical use, including scalpels, needles, scissors and other devices used in invasive surgical, therapeutic or diagnostic procedures; blood filters, implantable medical devices, including artificial blood vessels, catheters and other devices for the removal or delivery of fluids to patients, artificial hearts, artificial kidneys, orthopedic pins, plates and implants; catheters and other tubes (including urological and biliary tubes, endotracheal tubes, peripherably insertable central venous catheters, dialysis catheters, long term tunneled central venous catheters peripheral venous catheters, short term central venous catheters, arterial catheters, pulmonary catheters, Swan-Ganz catheters, urinary catheters, peritoneal catheters), urinary devices (including long term urinary devices, tissue bonding urinary devices, artificial urinary sphincters, urinary dilators), shunts (including ventricular or arterio-venous shunts); prostheses (including breast implants, penile prostheses, vascular grafting prostheses, aneurysm repair devices, heart valves, artificial joints, artificial larynxes, otological implants), anastomotic devices, vascular catheter ports, clamps, embolic devices, wound drain tubes, hydrocephalus shunts, pacemakers and implantable defibrillators, and the like. Other examples will be readily apparent to practitioners in these arts.

[0246] Surfaces found in the medical environment include also the inner and outer aspects of pieces of medical equipment, medical gear worn or carried by personnel in the health care setting. Such surfaces can include counter tops and fixtures in areas used for medical procedures or for preparing medical apparatus, tubes and canisters used in respiratory treatments, including the administration of oxygen, of solubilized drugs in nebulizers and of anesthetic agents. Also included are those surfaces intended as biological barriers to infectious organisms in medical settings, such as gloves, aprons and faceshields. Commonly used materials for biological barriers may be latex-based or non-latex based. Vinyl is commonly used as a material for non-latex surgical gloves. Other such surfaces can include handles and cables for medical or dental equipment not intended to be sterile. Additionally, such surfaces can include those non-sterile external surfaces of tubes and other apparatus found in areas where blood or body fluids or other hazardous biomaterials are commonly encountered. Other surfaces include medical gauzes and plasters such as band-aids.

[0247] Other surfaces related to health include the inner and outer aspects of those articles involved in water purification, water storage and water delivery, and those articles involved in food processing. Thus the present invention envisions coating a solid surface of a food or beverage container to extend the shelf life of its contents.

[0248] Surfaces related to health can also include the inner and outer aspects of those household articles involved in providing for nutrition, sanitation or disease prevention. Examples can include food processing equipment for home use, materials for infant care, tampons and toilet bowls.

[0249] Typically, the subject being treated is a mammalian subject—e.g. human, fowl, rodent or primate.

[0250] According to one embodiment, the above-mentioned nucleic acid construct is administered as naked DNA or in a carrier—such as a liposome. According to another embodiment of this aspect of the present invention the polynucleotides are delivered to the bacteria using a targeting moiety (see for example Yacoby and Benhar, Infect Disord Drug Targets. 2007 September; 7(3):221-9).

[0251] Thus, according to another embodiment of this aspect of the present invention, the subject is administered with the polynucleotides of the present invention using bacteriophages. According to one embodiment, the bacteriophages are lytic phages.

[0252] Treatment of bacterial infections using bacteriophages is well known in the art.

[0253] Bacteriophage(s) suitable for use in treatment of a subject can be selected based upon the suspected bacterial pathogen infecting the subject. Methods for diagnosis of bacterial infections and determination of their sensitivities are well known in the art. Where such diagnosis involves culturing a biological sample from the subject, the clinician can at the same time test the susceptibility of the infecting pathogen to growth inhibition by one or more therapeutic phages that are candidates for subsequent therapy.

[0254] In order to address the problem of rapid clearance by the spleen, liver and the reticulo-endothelial system of bacteriophages, the present inventors contemplate the use of long-circulating variants of wild type phages (see for example Merrill et al (Proc. Natl. Acad. Sci. USA 93, 3188 (1996) and U.S. Pat. No. 5,688,501) or holing modified bacteriophages—see for example U.S. Pat. Appl. 20040156831.

[0255] Selection of the gene to be downregulated will depend on the bacterial infection being treated. According to one embodiment, the spacers of the modified CRISPRs of the present invention are designed such that they target a gene that is highly conserved among bacteria; such spacers will lead to broad-spectrum killing. According to one embodiment, the spacers of the modified CRISPRs of the present invention are designed such that they target a gene that is unique to a specific bacteria; such spacers will lead to narrow-spectrum killing.

[0256] According to another embodiment, the bacterial infection being treated is an antibiotic resistant bacterial infection—e.g. infections induced by methicillin resistant Staphylococcus aureus or vancomycin resistant Staphylococcus aureus. In this case, the spacers of the modified CRISPRs of the present invention are designed such that they target an antibiotic resistance gene.

[0257] The bacteriophages comprising the modified CRISPRs of the present invention may be administered per se, or as part of a pharmaceutical composition.

[0258] As used herein a “pharmaceutical composition” refers to a preparation of one or more of the active ingredients described herein with other chemical components such as physiologically suitable carriers and excipients. The purpose of a pharmaceutical composition is to facilitate administration of the active agent to an organism.

[0259] Herein the term “active ingredient” refers to the modified CRISPR accountable for the biological effect.

[0260] Hereinafter, the phrases “physiologically acceptable carrier” and “pharmaceutically acceptable carrier” which may be interchangeably used refer to a carrier or a diluent that does not cause significant irritation to an organism and does not abrogate the biological activity and properties of the administered compound. An adjuvant is included under these phrases.

[0261] Herein the term “excipient” refers to an inert substance added to a pharmaceutical composition to further facilitate administration of an active ingredient. Examples, without limitation, of excipients include calcium carbonate, calcium phosphate, various sugars and types of starch, cellulose derivatives, gelatin, vegetable oils and polyethylene glycols.

[0262] Techniques for formulation and administration of drugs may be found in “Remington's Pharmaceutical Sciences,” Mack Publishing Co., Easton, Pa., latest edition, which is incorporated herein by reference.

[0263] Suitable routes of administration may, for example, include oral, rectal, transmucosal, especially transnasal, intestinal or parenteral delivery, including intramuscular, subcutaneous and intramedullary injections as well as intrathecal, direct intraventricular, intracardiac, e.g., into the right or left ventricular cavity, into the common coronary artery, intravenous, intraperitoneal, intranasal, or intraocular injections.

[0264] Alternately, one may administer the pharmaceutical composition in a local rather than systemic manner, for example, via injection of the pharmaceutical composition directly into a tissue region of a patient.

[0265] Pharmaceutical compositions of the present invention may be manufactured by processes well known in the art, e.g., by means of conventional mixing, dissolving, granulating, dragee-making, levigating, emulsifying, encapsulating, entrapping or lyophilizing processes.

[0266] Pharmaceutical compositions for use in accordance with the present invention thus may be formulated in conventional manner using one or more physiologically acceptable carriers comprising excipients and auxiliaries, which facilitate processing of the active ingredients into preparations which, can be used pharmaceutically. Proper formulation is dependent upon the route of administration chosen.

[0267] For injection, the active ingredients of the pharmaceutical composition may be formulated in aqueous solutions, preferably in physiologically compatible buffers such as Hank's solution, Ringer's solution, or physiological salt buffer. For transmucosal administration, penetrants appropriate to the barrier to be permeated are used in the formulation. Such penetrants are generally known in the art.

[0268] For oral administration, the pharmaceutical composition can be formulated readily by combining the active compounds with pharmaceutically acceptable carriers well known in the art. Such carriers enable the pharmaceutical composition to be formulated as tablets, pills, dragees, capsules, liquids, gels, syrups, slurries, suspensions, and the like, for oral ingestion by a patient. Pharmacological preparations for oral use can be made using a solid excipient, optionally grinding the resulting mixture, and processing the mixture of granules, after adding suitable auxiliaries if desired, to obtain tablets or dragee cores. Suitable excipients are, in particular, fillers such as sugars, including lactose, sucrose, mannitol, or sorbitol; cellulose preparations such as, for example, maize starch, wheat starch, rice starch, potato starch, gelatin, gum tragacanth, methyl cellulose, hydroxypropylmethyl-cellulose, sodium carbomethylcellulose; and/or physiologically acceptable polymers such as polyvinylpyrrolidone (PVP). If desired, disintegrating agents may be added, such as cross-linked polyvinyl pyrrolidone, agar, or alginic acid or a salt thereof such as sodium alginate.

[0269] Dragee cores are provided with suitable coatings. For this purpose, concentrated sugar solutions may be used which may optionally contain gum arabic, talc, polyvinyl pyrrolidone, carbopol gel, polyethylene glycol, titanium dioxide, lacquer solutions and suitable organic solvents or solvent mixtures. Dyestuffs or pigments may be added to the tablets or dragee coatings for identification or to characterize different combinations of active compound doses.

[0270] Pharmaceutical compositions which can be used orally, include push-fit capsules made of gelatin as well as soft, sealed capsules made of gelatin and a plasticizer, such as glycerol or sorbitol. The push-fit capsules may contain the active ingredients in admixture with filler such as lactose, binders such as starches, lubricants such as talc or magnesium stearate and, optionally, stabilizers. In soft capsules, the active ingredients may be dissolved or suspended in suitable liquids, such as fatty oils, liquid paraffin, or liquid polyethylene glycols. In addition, stabilizers may be added. All formulations for oral administration should be in dosages suitable for the chosen route of administration.

[0271] For buccal administration, the compositions may take the form of tablets or lozenges formulated in conventional manner.

[0272] For administration by nasal inhalation, the active ingredients for use according to the present invention are conveniently delivered in the form of an aerosol spray presentation from a pressurized pack or a nebulizer with the use of a suitable propellant, e.g., dichlorodifluoromethane, trichlorofluoromethane, dichloro-tetrafluoroethane or carbon dioxide. In the case of a pressurized aerosol, the dosage unit may be determined by providing a valve to deliver a metered amount. Capsules and cartridges of, e.g., gelatin for use in a dispenser may be formulated containing a powder mix of the compound and a suitable powder base such as lactose or starch.

[0273] The pharmaceutical composition described herein may be formulated for parenteral administration, e.g., by bolus injection or continuos infusion. Formulations for injection may be presented in unit dosage form, e.g., in ampoules or in multidose containers with optionally, an added preservative. The compositions may be suspensions, solutions or emulsions in oily or aqueous vehicles, and may contain formulatory agents such as suspending, stabilizing and/or dispersing agents.

[0274] Pharmaceutical compositions for parenteral administration include aqueous solutions of the active preparation in water-soluble form. Additionally, suspensions of the active ingredients may be prepared as appropriate oily or water based injection suspensions. Suitable lipophilic solvents or vehicles include fatty oils such as sesame oil, or synthetic fatty acids esters such as ethyl oleate, triglycerides or liposomes. Aqueous injection suspensions may contain substances, which increase the viscosity of the suspension, such as sodium carboxymethyl cellulose, sorbitol or dextran. Optionally, the suspension may also contain suitable stabilizers or agents which increase the solubility of the active ingredients to allow for the preparation of highly concentrated solutions.

[0275] Alternatively, the active ingredient may be in powder form for constitution with a suitable vehicle, e.g., sterile, pyrogen-free water based solution, before use.

[0276] The pharmaceutical composition of the present invention may also be formulated in rectal compositions such as suppositories or retention enemas, using, e.g., conventional suppository bases such as cocoa butter or other glycerides.

[0277] Pharmaceutical compositions suitable for use in context of the present invention include compositions wherein the active ingredients are contained in an amount effective to achieve the intended purpose. More specifically, a therapeutically effective amount means an amount of active ingredients effective to prevent, alleviate or ameliorate symptoms of bacterial infection or prolong the survival of the subject being treated.

[0278] Determination of a therapeutically effective amount is well within the capability of those skilled in the art, especially in light of the detailed disclosure provided herein.

[0279] For any preparation used in the methods of the invention, the therapeutically effective amount or dose can be estimated initially from in vitro and cell culture assays. For example, a dose can be formulated in animal models to achieve a desired concentration or titer. Such information can be used to more accurately determine useful doses in humans.

[0280] Toxicity and therapeutic efficacy of the active ingredients described herein can be determined by standard pharmaceutical procedures in vitro, in cell cultures or experimental animals. The data obtained from these in vitro and cell culture assays and animal studies can be used in formulating a range of dosage for use in human. The dosage may vary depending upon the dosage form employed and the route of administration utilized. The exact formulation, route of administration and dosage can be chosen by the individual physician in view of the patient's condition. (See e.g., Fingl, et al., 1975, in “The Pharmacological Basis of Therapeutics”, Ch. 1 p. 1).

[0281] Dosage amount and interval may be adjusted individually to provide tissue or blood levels of the active ingredient are sufficient to induce or suppress the biological effect (minimal effective concentration, MEC). The MEC will vary for each preparation, but can be estimated from in vitro data. Dosages necessary to achieve the MEC will depend on individual characteristics and route of administration. Detection assays can be used to determine plasma concentrations.

[0282] Depending on the severity and responsiveness of the condition to be treated, dosing can be of a single or a plurality of administrations, with course of treatment lasting from several days to several weeks or until cure is effected or diminution of the disease state is achieved.

[0283] The amount of a composition to be administered will, of course, be dependent on the subject being treated, the severity of the affliction, the manner of administration, the judgment of the prescribing physician, etc.

[0284] Compositions of the present invention may, if desired, be presented in a pack or dispenser device, such as an FDA approved kit, which may contain one or more unit dosage forms containing the active ingredient. The pack may, for example, comprise metal or plastic foil, such as a blister pack. The pack or dispenser device may be accompanied by instructions for administration. The pack or dispenser may also be accommodated by a notice associated with the container in a form prescribed by a governmental agency regulating the manufacture, use or sale of pharmaceuticals, which notice is reflective of approval by the agency of the form of the compositions or human or veterinary administration. Such notice, for example, may be of labeling approved by the U.S. Food and Drug Administration for prescription drugs or of an approved product insert. Compositions comprising a preparation of the invention formulated in a compatible pharmaceutical carrier may also be prepared, placed in an appropriate container, and labeled for treatment of an indicated condition, as is further detailed above.

[0285] As mentioned, the modified bacteria of the present invention may be present in food products as well as in food additives.

[0286] The phrase “food additive” [defined by the FDA in 21 C.F.R. 170.3(e)(1)] includes any liquid or solid material intended to be added to a food product. This material can, for example, include an agent having a distinct taste and/or flavor or a physiological effect (e.g., vitamins).

[0287] The food additive composition of the present invention can be added to a variety of food products.

[0288] As used herein, the phrase “food product” describes a material consisting essentially of protein, carbohydrate and/or fat, which is used in the body of an organism to sustain growth, repair and vital processes and to furnish energy. Food products may also contain supplementary substances such as minerals, vitamins and condiments. See Merriani-Webster's Collegiate Dictionary, 10th Edition, 1993. The phrase “food product” as used herein further includes a beverage adapted for human or animal consumption. A food product containing the food additive of the present invention can also include additional additives such as, for example, antioxidants, sweeteners, flavorings, colors, preservatives, nutritive additives such as vitamins and minerals, amino acids (i.e. essential amino acids), emulsifiers, pH control agents such as acidulants, hydrocolloids, antifoams and release agents, flour improving or strengthening agents, raising or leavening agents, gases and chelating agents, the utility and effects of which are well-known in the art.

[0289] It will be appreciated that the CRISPR polynucleotides of the present invention may also be used to identify a function of a particular prokaryotic gene.

[0290] According to this aspect of the present invention, the modified CRISPR polynucleotides of the present invention are introduced into prokaryotic cells, wherein a spacer of the CRISPR is directed against a prokaryotic gene of unknown function. A phenotype of the prokaryote is then assayed. Depending on the outcome of the assay, the function of the gene can be determined (i.e. annotated).

[0291] According to one embodiment, the phenotype is examined using “phenotype microarray analysis”—see for example Zhou et al Journal of Bacteriology, August 2003, p. 4956-4972, Vol. 185, No. 16.

[0292] The modified CRISPR arrays of the present invention may also be used to generate a library of clones, each of which containing a different down-regulated gene. Such libraries have been prepared for Escherichia coli K-12, [Baba et al., Construction of Escherichia coli K-12 in-frame, single-gene knockout mutants: the Keio collection” Molecular Systems Biology 2 Article number: 2006.0008]. However, construction of this library was extremely labor intensive and expensive. Organisms of interest for production of such libraries include bio-energy relevant organisms such as Synechocystis sp. PCC 6803 or in which it is needed to determine which genes are needed to be silenced in order to enhance the production of the desired output biofuel. This could also be done for organisms generating a biotechnologically relevant product (other than a bio-fuel). Organisms of interest for production of such libraries include human pathogens, animal pathogens and plant pathogens.

[0293] As mentioned, the constructs of the present invention may be useful in the generation of biofuels in bacteria.

[0294] Thus, according to another aspect of the present invention, there is provided a method of generating an organic material in bacteria, the method comprising downregulating a gene which compromises the generation of the organic material in the bacteria.

[0295] Using the CRISPR polynucleotides described herein, new virulence genes can be discovered in pathogens. According to this embodiment, a library of isolated polynucleotides, each comprising a clustered, regularly interspaced short palindromic repeat (CRISPR) array nucleic acid sequence wherein at least one spacer of the CRISPR is sufficiently complementary to a portion of at least one bacterial gene, will be constructed such that each isolated polynucleotide down regulates one gene in a specific pathogen. This library may then by used to serially down regulate each gene in the pathogen. Concomitant with down regulation of each of the genes separately, a virulence assay may be conducted, such that the virulence is measured when the specific gene is down regulated. Genes whose down regulation interferes with virulence will be identified as virulence-associated genes. Vaccines or antibiotics could be made to target these specific genes.

[0296] It is expected that during the life of a patent maturing from this application many relevant CRISPR arrays and systems will be identified and the scope of the term CRISPR array is intended to include all such new technologies a priori

[0297] As used herein the term “about” refers to ±10%

[0298] The terms “comprises”, “comprising”, “includes”, “including”, “having” and their conjugates mean “including but not limited to”.

[0299] The term “consisting of means “including and limited to”.

[0300] The term “consisting essentially of” means that the composition, method or structure may include additional ingredients, steps and/or parts, but only if the additional ingredients, steps and/or parts do not materially alter the basic and novel characteristics of the claimed composition, method or structure.

[0301] As used herein the term “method” refers to manners, means, techniques and procedures for accomplishing a given task including, but not limited to, those manners, means, techniques and procedures either known to, or readily developed from known manners, means, techniques and procedures by practitioners of the chemical, pharmacological, biological, biochemical and medical arts.

[0302] It is appreciated that certain features of the invention, which are, for clarity, described in the context of separate embodiments, may also be provided in combination in a single embodiment. Conversely, various features of the invention, which are, for brevity, described in the context of a single embodiment, may also be provided separately or in any suitable subcombination or as suitable in any other described embodiment of the invention. Certain features described in the context of various embodiments are not to be considered essential features of those embodiments, unless the embodiment is inoperative without those elements.

[0303] Various embodiments and aspects of the present invention as delineated hereinabove and as claimed in the claims section below find experimental support in the following examples.

### EXAMPLES

[0304] Reference is now made to the following examples, which together with the above descriptions illustrate some embodiments of the invention in a non limiting fashion.

[0305] Reference is now made to the following examples, which together with the above descriptions, illustrate the invention in a non limiting fashion.

[0306] Generally, the nomenclature used herein and the laboratory procedures utilized in the present invention include molecular, biochemical, microbiological and recombinant DNA techniques. Such techniques are thoroughly explained in the literature. See, for example, “Molecular Cloning: A laboratory Manual” Sambrook et al., (1989); “Current Protocols in Molecular Biology” Volumes I-III Ausubel, R. M., ed. (1994); Ausubel et al., “Current Protocols in Molecular Biology”, John Wiley and Sons, Baltimore, Md. (1989); Perbal, “A Practical Guide to Molecular Cloning”, John Wiley & Sons, New York (1988); Watson et al., “Recombinant DNA”, Scientific American Books, New York; Birren et al. (eds) “Genome Analysis: A Laboratory Manual Series”, Vols. 1-4, Cold Spring Harbor Laboratory Press, New York (1998); methodologies as set forth in U.S. Pat. Nos. 4,666,828; 4,683,202; 4,801,531; 5,192,659 and 5,272,057; “Cell Biology: A Laboratory Handbook”, Volumes I-III Cellis, J. E., ed. (1994); “Culture of Animal Cells—A Manual of Basic Technique” by Freshney, Wiley-Liss, N. Y. (1994), Third Edition; “Current Protocols in Immunology” Volumes I-III Coligan J. E., ed. (1994); Stites et al. (eds), “Basic and Clinical Immunology” (8th Edition), Appleton & Lange, Norwalk, Conn. (1994); Mishell and Shiigi (eds), “Selected Methods in Cellular Immunology”, W. H. Freeman and Co., New York (1980); available immunoassays are extensively described in the patent and scientific literature, see, for example, U.S. Pat. Nos. 3,791,932; 3,839,153; 3,850,752; 3,850,578; 3,853,987; 3,867,517; 3,879,262; 3,901,654; 3,935,074; 3,984,533; 3,996,345; 4,034,074; 4,098,876; 4,879,219; 5,011,771 and 5,281,521; “Oligonucleotide Synthesis” Gait, M. J., ed. (1984); “Nucleic Acid Hybridization” Hames, B. D., and Higgins S. J., eds. (1985); “Transcription and Translation” Hames, B. D., and Higgins S. J., eds. (1984); “Animal Cell Culture” Freshney, R. I., ed. (1986); “Immobilized Cells and Enzymes” IRL Press, (1986); “A Practical Guide to Molecular Cloning” Perbal, B., (1984) and “Methods in Enzymology” Vol. 1-317, Academic Press; “PCR Protocols: A Guide To Methods And Applications”, Academic Press, San Diego, Calif. (1990); Marshak et al., “Strategies for Protein Purification and Characterization—A Laboratory Course Manual” CSHL Press (1996); all of which are incorporated by reference as if fully set forth herein. Other general references are provided throughout this document. The procedures therein are believed to be well known in the art and are provided for the convenience of the reader. All the information contained therein is incorporated herein by reference.

### Example 1

### Identification and Characterization of RAMP Modules in Bacterial Genomes

[0307] Currently, there is no database or public resource that connects between CRISPR array and its associated cas genes. To identify RAMP modules in prokaryotes that can function in downregulating prokaryotic genes, the present inventors computationally scanned the genomes of 334 CRISPR-bearing organisms. Non-questionable CRISPR arrays, spacers, and repeats were obtained from CRISPRdb [Grissa et al, BMC Bioinformatics 8, 172, 2007]. For each CRISPR-bearing organism, information regarding cas genes was obtained from both the Genbank file and from IMG (Integrated Microbial Genomes) at JGI (www.imgdotjgidotdoedotgov/cgi-bin/pub/maindotcgi). For this example, cas genes were defined as genes that were assigned one of the TIGRFAM profiles that were defined in [Haft et al, PLoS Comput Biol. 1, e60, 2005]. For this example, an array of cas genes (cas array) was defined as one or more consecutive cas genes with up to 2 intervening non-cas genes. A “CRISPR system” was defined for this example as a cas array associated to its closest CRISPR array in the analyzed genome. RAMP modules were defined as a cas array+CRISPR array, where the cas array contains at least 4 genes, and where at least one gene belongs to the RAMP subtype, as defined by [Haft et al, PLoS Comput Biol. 1, e60, 2005].

[0308] Characterization of RAMP Modules in Bacterial Genomes:

[0309] The search above identified 73 RAMP modules (Table 1, herein below).

TABLE 1

| | NCBI | | Optimal | | cas_array_ | |
|---|---|---|---|---|---|---|
| No. | accession | organism name | growth temp | domain | accession | start pos |
| 1 | NC_008095 | Myxococcus xanthus | Mesophile | Bacteria | NC_008095.3 | 8888371 |
| | | DK 1622 | | | | |
| 2 | NC_002570 | Bacillus halodurans | Mesophile | Bacteria | NC_002570.1 | 347483 |
| | | C-125 | | | | |
| 3 | NC_010482 | Candidatus Korarchaecum | Mesophile | Archaea | NC_010482.2 | 433841 |
| | | cryptofilum OPF8 | | | | |
| 4 | NC_010803 | Chlorobium limicola | Mesophile | Bacteria | NC_010803.2 | 1009061 |
| | | DSM 245 | | | | |
| 5 | NC_011026 | Chloroherpeton thalassium | Mesophile | Bacteria | NC_011026.1 | 1118238 |
| | | ATCC 35110 | | | | |
| 6 | NC_009697 | Clostridium botulinum | Mesophile | Bacteria | NC_009697.2 | 2243224 |
| | | A ATCC 19397 | | | | |
| 7 | NC_009495 | Clostridium botulinum | Mesophile | Bacteria | NC_009495.2 | 2314499 |
| | | A ATCC 3502 | | | | |
| 8 | NC_009698 | Clostridium botulinum | Mesophile | Bacteria | NC_009698.2 | 2243443 |
| | | A Hall | | | | |
| 9 | NC_009699 | Clostridium botulinum | Mesophile | Bacteria | NC_009699.2 | 2365025 |
| | | F Langeland | | | | |
| 10 | NC_010546 | Cyanothece sp. | Mesophile | Bacteria | NC_010546.1 | 345339 |
| | | ATCC 51142 | | | | |
| 11 | NC_008789 | Halorhodospira halophila | Mesophile | Bacteria | NC_008789.1 | 697188 |
| | | SL1 | | | | |
| 12 | NC_009972 | Herpetosiphon aurantiacus | Mesophile | Bacteria | NC_009972.1 | 661191 |
| | | ATCC 23779 | | | | |
| 13 | NC_009972 | Herpetosiphon aurantiacus | Mesophile | Bacteria | NC_009972.2 | 798867 |
| | | ATCC 23779 | | | | |
| 14 | NC_009654 | Marinomonas sp. | Mesophile | Bacteria | NC_009654.1 | 3037434 |
| | | MWYL1 | | | | |
| 15 | NC_009634 | Methanococcus vannielii | Mesophile | Archaea | NC_009634.2 | 117348 |
| | | SB | | | | |
| 16 | NC_007355 | Methanosarcina barkeri | Mesophile | Archaca | NC_007355.2 | 1667328 |
| | | fusaro | | | | |
| 17 | NC_003901 | Methanosarcina mazei | Mesophile | Archaea | NC_003901.3 | 4081676 |
| | | Go1 | | | | |
| 18 | NC_003272 | Nostoc sp. PCC 7120 | Mesophile | Bacteria | NC_003272.3 | 1737678 |
| 19 | NC_010729 | Porphyromonas gingivalis | Mesophile | Bacteria | NC_010729.1 | 2146958 |
| | | ATCC 33277 | | | | |
| 20 | NC_002950 | Porphyromonas gingivalis | Mesophile | Bacteria | NC_002950.1 | 2069305 |
| | | W83 | | | | |
| 21 | NC_011059 | Prosthecochloris aestuarii | Mesophile | Bacteria | NC_011059.3 | 2176063 |
| | | SK413, DSM 271 | | | | |
| 22 | NC_010162 | Sorangium cellulosum | Mesophile | Bacteria | NC_010162.3 | 7992067 |
| | | So ce 56 | | | | |
| 23 | NC_008532 | Streptococcus thermophilus | Mesophile | Bacteria | NC_008532.2 | 895636 |
| | | LMD-9 | | | | |
| 24 | NC_006448 | Streptococcus thermophilus | Mesophile | Bacteria | NC_006448.2 | 862566 |
| | | LMG 18311 | | | | |
| 25 | NC_010480 | Synechococcus sp. | Mesophile | Bacteria | NC_010480.1 | 44557 |
| | | PCC 7002 | | | | |
| 26 | NC_005230 | Synechocystis sp. | Mesophile | Bacteria | NC_005230.4 | 80203 |
| | | PCC 6803 | | | | |
| 27 | NC_007759 | Syntrophus aciditrophicus | Mesophile | Bacteria | NC_007759.1 | 589475 |
| | | SB | | | | |
| 28 | NC_000918 | Aquifex aeolicus VF5 | Thermophile | Bacteria | NC_000918.2 | 245338 |
| 29 | NC_000917 | Archaeoglobus fulgidus | Thermophile | Archaea | NC_000917.2 | 1671367 |
| | | DSM 4304 | | | | |
| 30 | NC_009954 | Caldivirga maquilingensis | Thermophile | Archaea | NC_009954.1 | 1589302 |
| | | IC-167 | | | | |
| 31 | NC_010424 | Candidatus Desulforudis | Thermophile | Bacteria | NC_010424.2 | 1887334 |
| | | audaxviator MP104C | | | | |
| 32 | NC_010424 | Candidatus Desulforudis | Thermophile | Bacteria | NC_010424.3 | 1914037 |
| | | audaxviator MP104C | | | | |
| 33 | NC_010175 | Chloroflexus aurantiacus | Thermophile | Bacteria | NC_010175.5 | 3122962 |
| | | J-10-fl | | | | |
| 34 | NC_008025 | Deinococcus geothermalis | Thermophile | Bacteria | NC_008025.2 | 1025204 |
| | | DSM 11300 | | | | |
| 35 | NC_008818 | Hyperthermus butylicus | Thermophile | Archaea | NC_008818.3 | 688803 |
| | | DSM 5456 | | | | |
| 36 | NC_009776 | Ignicoccus hospitalis | Thermophile | Archaea | NC_009776.1 | 282698 |
| | | KIN4/I | | | | |
| 37 | NC_003551 | Methanopyrus kandleri | Thermophile | Archaea | NC_003551.2 | 1292953 |
| | | AV19 | | | | |
| 38 | NC_008553 | Methanosaeta thermophila | Thermophile | Archaea | NC_008553.1 | 662154 |
| | | PT | | | | |
| 39 | NC_000916 | Methanothermobacter | Thermophile | Archaea | NC_000916.1 | 259228 |
| | | thermautotrophicus Delta H | | | | |
| 40 | NC_009454 | Pelotomaculum | Thermophile | Bacteria | NC_009454.1 | 702243 |
| | | thermopropionicum SI | | | | |
| 41 | NC_009454 | Pelotomaculum | Thermophile | Bacteria | NC_009454.2 | 2026733 |
| | | thermopropionicum SI | | | | |
| 42 | NC_009376 | Pyrobaculum arsenaticum | Thermophile | Archaea | NC_009376.3 | 1004361 |
| | | DSM 13514 | | | | |
| 43 | NC_009073 | Pyrobaculum calidifontis | Thermophile | Archaea | NC_009073.3 | 265427 |
| | | JCM 11548 | | | | |
| 44 | NC_009073 | Pyrobaculum calidifontis | Thermophile | Archaea | NC_009073.5 | 1176822 |
| | | JCM 11548 | | | | |
| 45 | NC_003413 | Pyrococcus furiosus | Thermophile | Archaea | NC_003413.4 | 1066025 |
| | | DSM 3638 | | | | |
| 46 | NC_009767 | Roseiflexus castenholzii | Thermophile | Bacteria | NC_009767.2 | 224482 |
| | | DSM 13941 | | | | |
| 47 | NC_009523 | Roseiflexus sp. RS-1 | Thermophile | Bacteria | NC_009523.1 | 465177 |
| 48 | NC_009523 | Roseiflexus sp. RS-1 | Thermophile | Bacteria | NC_009523.3 | 1754446 |
| 49 | NC_009523 | Roseiflexus sp. RS-1 | Thermophile | Bacteria | NC_009523.5 | 3213377 |
| 50 | NC_008148 | Rubrobacter xylanophilus | Thermophile | Bacteria | NC_008148.1 | 263398 |
| | | DSM 9941 | | | | |
| 51 | NC_002754 | Sulfolobus solfataricus P2 | Thermophile | Archaea | NC_002754.10 | 1799790 |
| 52 | NC_002754 | Sulfolobus solfataricus P2 | Thermophile | Archaea | NC_002754.5 | 1277348 |
| 53 | NC_002754 | Sulfolobus solfataricus P2 | Thermophile | Archaea | NC_002754.7 | 1365033 |
| 54 | NC_002754 | Sulfolobus solfataricus P2 | Thermophile | Archaea | NC_002754.8 | 1564763 |
| 55 | NC_003106 | Sulfolobus tokodaii 7 | Thermophile | Archaea | NC_003106.1 | 10108 |
| 56 | NC_003106 | Sulfolobus tokodaii 7 | Thermophile | Archaea | NC_003106.9 | 1985714 |
| 57 | NC_010730 | Sulfurihydrogenibium sp. | Thermophile | Bacteria | NC_010730.1 | 675839 |
| | | YO3AOP1 | | | | |
| 58 | NC_007776 | Synechococcus sp. | Thermophile | Bacteria | NC_007776.2 | 596531 |
| | | JA-2-3Ba(2-13) | | | | |
| 59 | NC_007776 | Synechococcus sp. | Thermophile | Bacteria | NC_007776.5 | 871945 |
| | | JA-2-3Ba(2-13) | | | | |
| 60 | NC_007775 | Synechococcus sp. JA-3-3Ab | Thermophile | Bacteria | NC_007775.4 | 881677 |
| 61 | NC_007775 | Synechococcus sp. JA-3-3Ab | Thermophile | Bacteria | NC_007775.5 | 2559707 |
| 62 | NC_003869 | Thermoanaerobacter | Thermophile | Bacteria | NC_003869.2 | 2523470 |
| | | tengcongensis MH4 | | | | |
| 63 | NC_007333 | Thermobifida fusca YX | Thermophile | Bacteria | NC_007333.1 | 1819567 |
| 64 | NC_008698 | Thermofilum pendens Hrk 5 | Thermophile | Archaea | NC_008698.3 | 1228909 |
| 65 | NC_008698 | Thermofilum pendens Hrk5 | Thermophile | Archaca | NC_008698.4 | 1261982 |
| 66 | NC_010525 | Thermoproteus neutrophilus | Thermophile | Archaea | NC_010525.3 | 514713 |
| | | V24Sta | | | | |
| 67 | NC_009616 | Thermosipho melanesiensis | Thermophile | Bacteria | NC_009616.3 | 1642545 |
| | | BI429 | | | | |
| 68 | NC_009828 | Thermotoga lettingae | Thermophile | Bacteria | NC_009828.2 | 1250942 |
| | | TMO | | | | |
| 69 | NC_000853 | Thermotoga maritima | Thermophile | Bacteria | NC_000853.1 | 1766027 |
| | | MSB8 | | | | |
| 70 | NC_010483 | Thermotoga sp. RQ2 | Thermophile | Bacteria | NC_010483.1 | 297079 |
| 71 | NC_010483 | Thermotoga sp. RQ2 | Thermophile | Bacteria | NC_010483.3 | 1064228 |
| 72 | NC_005838 | Thermus thermophilus | Thermophile | Bacteria | NC_005838.2 | 106247 |
| | | HB 27 | | | | |
| 73 | NC_006462 | Thermus thermophilus | Thermophile | Bacteria | NC_006462.2 | 151610 |
| | | HB8 | | | | |

| | | | | | | Distance | |
|---|---|---|---|---|---|---|---|
| | | | | associated | | to closest | |
| | | array | no of | CRISPR | | CRISPR | |
| No. | end pos | number | genes | arrays | Closest array | array | subtype |
| 1 | 8896616 | 3 | 8 | .NC_008095_13 | NC_008095_13 | 305 | .ramp |
| 2 | 353902 | 1 | 6 | .NC_002570_2 | NC_002570_2 | 396 | .ramp |
| 3 | 463588 | 2 | 22 | .NC_010482_2 | NC_010482_2 | 205 | .ramp. |
| | | | | | | | apern |
| 4 | 1023753 | 2 | 7 | .NC_010803_3 | NC_010803_3 | 874 | .csx.ramp |
| 5 | 1126262 | 1 | 7 | | NC_011026_3 | 47984 | .ramp |
| 6 | 2248370 | 2 | 5 | | NC_009697_8 | 4065 | .ramp |
| 7 | 2319645 | 2 | 5 | | NC_009495_8 | 4065 | .ramp |
| 8 | 2248589 | 2 | 5 | | NC_009698_8 | 4065 | .ramp |
| 9 | 2373694 | 2 | 8 | .NC_009699_12 | NC_009699_12 | 188 | .ramp |
| 10 | 355535 | 1 | 9 | .NC_010546_1 | NC_010546_1 | 264 | .ramp |
| 11 | 713310 | 1 | 16 | .NC_008789_1 | NC_008789_1 | 462 | .ramp |
| 12 | 667817 | 1 | 6 | | NC_009972_3 | 243154 | .ramp |
| 13 | 805983 | 2 | 6 | | NC_009972_6 | 234076 | .ramp |
| 14 | 3045414 | 1 | 8 | .NC_009654_2 | NC_009654_2 | 130 | .ramp. |
| | | | | | | | ypest |
| 15 | 122250 | 2 | 5 | | NC_009634_1 | 5174 | .ramp |
| 16 | 1673445 | 2 | 4 | | NC_007355_11 | 5707 | .ramp.csx |
| 17 | 4087769 | 3 | 4 | | NC_003901_10 | 1541 | .csx.ramp |
| 18 | 1745966 | 3 | 8 | | NC_003272_7 | 4357 | .csx.ramp. |
| | | | | | | | ramp2 |
| 19 | 2156418 | 1 | 9 | | NC_010729_10 | 17330 | .ramp |
| 20 | 2077522 | 1 | 7 | .NC_002950_5 | NC_002950_5 | 401 | .ramp |
| 21 | 2187002 | 3 | 7 | .NC_011059_3 | NC_011059_3 | 534 | .ramp.csx |
| 22 | 8000671 | 3 | 6 | | NC_010162_24 | 21468 | .ramp |
| 23 | 904257 | 2 | 9 | | NC_008532_4 | 1434 | .mtube. |
| | | | | | | | ramp |
| 24 | 871795 | 2 | 11 | | NC_006448_2 | 1433 | .ramp. |
| | | | | | | | mtube |
| 25 | 51898 | 1 | 5 | | NC_010480_1 | 2630 | .ramp |
| 26 | 89898 | 4 | 9 | .NC_005230_3 | NC_005230_3 | 207 | .ramp |
| 27 | 601507 | 1 | 10 | .NC_007759_2 | NC_007759_2 | 264 | .ramp |
| 28 | 262955 | 2 | 17 | .NC_000918_3 | NC_000918_3 | 177 | .tneap. |
| | | | | .NC_000918_2 | | | ramp.csx |
| 29 | 1690587 | 2 | 21 | .NC_000917_3 | NC_000917_3 | 343 | .csx.apern. |
| | | | | | | | ramp |
| 30 | 1610359 | 1 | 18 | .NC_009954_7 | NC_009954_7 | 26 | .ramp.apern |
| 31 | 1898008 | 2 | 10 | .NC_010424_4 | NC_010424_4 | 293 | .ramp2.csx |
| 32 | 1931439 | 3 | 17 | | NC_010424_6 | 1965 | .ramp |
| 33 | 3126296 | 5 | 4 | | NC_010175_17 | 130648 | .ramp2.csx |
| 34 | 1033572 | 2 | 8 | .NC_008025_4 | NC_008025_4 | 191 | .ramp |
| 35 | 699716 | 3 | 6 | | NC_008818_2 | 2658 | .ramp |
| 36 | 289665 | 1 | 4 | .NC_009776_3 | NC_009776_3 | 956 | .ramp |
| 37 | 1306332 | 2 | 9 | .NC_003551_3 | NC_003551_3 | 582 | .ramp |
| 38 | 687708 | 1 | 17 | | NC_008553_15 | 7637 | .ramp.csx |
| 39 | 264481 | 1 | 4 | | NC_000916_1 | 188868 | .ramp.csx |
| 40 | 709845 | 1 | 6 | | NC_009454_2 | 1279297 | .ramp.csx |
| 41 | 2044723 | 2 | 16 | .NC_009454_5 | NC_009454_5 | 176 | .ramp.hmari |
| 42 | 1030712 | 3 | 21 | | NC_009376_2 | 2866 | .ramp.apern |
| 43 | 275220 | 3 | 8 | .NC_009073_2 | NC_009073_2 | 223 | .ramp |
| 44 | 1201070 | 5 | 21 | | NC_009073_6 | 2281 | .apern.ramp |
| 45 | 1082264 | 4 | 15 | .NC_003413_7 | NC_003413_7 | 482 | .ramp.tneap |
| 46 | 229766 | 2 | 5 | | NC_009767_2 | 46105 | .ramp. |
| | | | | | | | ramp2.csx |
| 47 | 470489 | 1 | 5 | | NC_009523_2 | 259307 | .ramp.csx. |
| | | | | | | | ramp2 |
| 48 | 1760978 | 3 | 7 | | NC_009523_23 | 18445 | .ramp2.csx |
| 49 | 3221428 | 5 | 5 | | NC_009523_47 | 55325 | .ramp.csx |
| 50 | 281538 | 1 | 16 | .NC_008148_2 | NC_008148_2 | 159 | .hmari.ramp |
| 51 | 1807514 | 10 | 6 | | NC_002754_10 | 2258 | .ramp |
| 52 | 1280716 | 5 | 5 | | NC_002754_5 | 16437 | .ramp2 |
| 53 | 1368454 | 7 | 4 | | NC_002754_7 | 51888 | .ramp |
| 54 | 1571206 | 8 | 5 | | NC_002754_9 | 172801 | .ramp |
| 55 | 14279 | 1 | 5 | | NC_003106_1 | 11654 | .ramp2 |
| 56 | 1993250 | 9 | 6 | | NC_003106_4 | 213515 | .ramp |
| 57 | 681484 | 1 | 6 | | NC_010730_3 | 11598 | .ramp |
| 58 | 609307 | 2 | 10 | | NC_007776_4 | 4040 | .csx.ramp2 |
| 59 | 878468 | 5 | 4 | | NC_007776_5 | 4760 | .ramp |
| 60 | 897338 | 4 | 12 | | NC_007775_2 | 5004 | .ramp.csx. |
| | | | | | | | ramp2 |
| 61 | 2570837 | 5 | 10 | .NC_007775_10 | NC_007775_10 | 252 | .ramp |
| 62 | 2535850 | 2 | 9 | | NC_003869_3 | 1374 | .ramp |
| 63 | 1826460 | 1 | 6 | .NC_007333_8 | NC_007333_8 | 746 | .ramp |
| 64 | 1234237 | 3 | 4 | .NC_008698_2 | NC_008698_2 | 811 | .ramp2. |
| | | | | | | | mtube |
| 65 | 1279407 | 4 | 10 | | NC_008698_6 | 1340 | .csc.ramp |
| 66 | 520737 | 3 | 5 | | NC_010525_1 | 1004 | .ramp |
| 67 | 1650062 | 3 | 7 | .NC_009616_5 | NC_009616_5 | 918 | .ramp |
| 68 | 1259314 | 2 | 7 | | NC_009828_2 | 116357 | .ramp.csx |
| 69 | 1779740 | 1 | 12 | .NC_000853_8 | NC_000853_8 | 70 | .ramp.hmari |
| 70 | 304608 | 1 | 6 | | NC_010483_1 | 239575 | .csx. mtube. |
| | | | | | | | ramp |
| 71 | 1077979 | 3 | 13 | .NC_010483_5 | NC_010483_5 | 123 | .ramp.hmari |
| 72 | 112532 | 2 | 6 | | NC_005838_3 | 4627 | .ramp |
| 73 | 157896 | 2 | 6 | | NC_006462_6 | 4627 | .ramp |

[0310] Of these, 46 were in thermophilic organisms (organisms that optimally grow in high temperatures), and 27 in mesophiles (organisms optimally growing at a near body temperature). It is expected that proteins expressed in thermophiles are adapted to work in high temperatures, and might have a less optimal function when expressed in temperatures near 37° C. Therefore, in order to use RAMP modules from thermophiles, it can be hypothesized that specific amino acids should be changed in the cas genes to allow function at lower temperatures. This could be done in a process of molecular evolution.

[0311] The sequences of the 73 identified RAMP modules, as well as their associated repeat arrays and cas gene sequences, are set forth in SEQ ID NOs 1-1339).

### Example 2

### Down-Regulation of Three Genes in E. coli Bacteria

[0312] As a proof of concept, a RAMP module of the mesophilic organism Myxococcus xanthus DK 1622 may be used to silence three genes in E. coli. The RAMP module in this organism is found between positions 8888371-8896616 in its genome (NCBI accession NC_{—}008095), and contains 8 genes (FIG. 3). The three genes are GFP, RFP and malF (GFP and RFP are inserted into the E coli chromosome for the purpose of the proof of concept, while malF is a naturally occurring endogenous gene). Silencing of GFP and/or RFP is expected to result in loss of fluorescent emission, whist silencing of malF is expected to result in loss of ability to grow on maltose as the sole carbon source. In the present case, the spacers will target the cellular genes malF, GFP and RFP. In each construct four spacers will be designed targeting the antisense strand of each gene.

[0313] The cas array of the RAMP module will be amplified from the genome of Myxococcus xanthus DK 1622 using the following primers

[0314] AAAAAGATCTGATGAGACCACGAGGAGGTGATGTC (SEQ ID NO: 1350);

[0315] TTAATTAACACCGGCAAGCCTTCACGCGGCC (SEQ ID NO: 1351).

[0316] The amplified DNA will be cloned in a plasmid under the control of an inducible promoter and will be transformed to the E. coli strain BL21-AI.

[0317] In a modified version of this experiment, the RAMP module that will be cloned will contain only some of the cas genes, where one or more of the genes are omitted.

[0318] In a modified version of this experiment, another cas array will be cloned into the E. coli in conjugation with the plasmid described above. This cas array is of the Tneap subtype which resides on the genome of Myxococcus xanthus DK 1622 nearby the RAMP module (FIGS. 5-6), and might be involved in the processing of the repeat/spacer array of the RAMP module. SEQ ID NO: 1347 is the polynucleotide sequence of the cas array of the Myxococcus xanthus DK 1622 Genbank AC_{—}008095 RAMP module SEQ ID NO: 1348 provides the polynucleotide sequence of the cas array of the Myxococcus xanthus DK 1622 Genbank AC_{—}008095 CRISPR Tneap system.

[0319] The cas array of the Tneap subtype will be amplified from the genome of Myxococcus xanthus DK 1622 using the following primers

[0320] CGGATCCGTTGGCGCGGAGCGTCGGTTG (SEQ ID NO: 1352);

[0321] AAGCTTTCACAGCACCTTGAA (SEQ ID NO: 1353).

[0322] In a further modification, the Tneap cas array that will be cloned will contain only some of the cas genes, where one or more of the genes are omitted (for example, the Tneap cas array without cas 1 and cas2). SEQ ID No: 1349 provides the polynucleotide sequence of the cas array of the Myxococcus xanthus DK 1622 Genbank AC_{—}008095 CRISPR Tneap system without the cas1 and cas2 genes

[0323] To allow silencing of the selected genes, DNA constructs containing CRISPR arrays will be cloned in another plasmid under the control of an inducible promoter and will also be transformed to the E. coli strain BL21-AI (FIGS. 7-10). Each of the CRISPR array DNA construct will contain one or more spacers directed against the antisense strand of the gene to be silenced. In the current example, the number of targeting spacers per gene is 4.

[0324] To show that more than one gene can be silenced by the same RAMP module in parallel, a CRISPR array will be designed that targets both GFP and malF at the same time (FIG. 10).

[0325] As a control for the above described experiments a CRISPR array construct that does not target any E coli gene will also be transformed (FIG. 11).

[0326] Degradation of the RNA of the selected genes can be further verified by Northern Blot or quantitative PCR.

[0327] The CRISPR constructs for silencing GFP, RFP and malF expression in E. coli are illustrated in FIGS. 7-10. The GFP and malF sequences are illustrated in FIGS. 12-13.

### Example 3

### Down-Regulation of Genes in E. coli Bacteria Using a Neisseria sicca Derived CRISPR Polynucleotide Sequence

[0328] The RAMP CRISPR module of Neisseria sicca ATCC29256, a mesophilic bacteria isolated from the pharyngeal mucosa of healthy man was selected for experimentation. A draft genome of this organism is available, and in this genome (NCBI locus NZ_ACK002000045) a RAMP module was identified. This module was cloned into E. coli BL21 (DE3) on the pET-Duet compatible plasmids system, so that the CRISPR array (crRNA) was on one plasmid, and the cas genes were divided to two operons on two plasmids, all under an expression control inducible by IPTG (FIG. 14). Since the GC content and codon bias in the genomes of origin of each of these systems differ than that of E. coli, each system was synthesized with GC-content and codon-optimization for optimal expression in E. coli.

[0329] To test whether the RAMP system cloned into E. coli was active, the expression of each system was induced in E. coli BL21 using 0.1 mM IPTG. Total RNA was extracted and Northern blots were performed with probes designed against one of the spacers in the array. From the Northern blots, clear processing of the pre-crRNA was observed, confirming that the protein responsible for pre-crRNA processing are active (FIG. 15B). Moreover, similar to the Pyrococcus furiosus RAMP, two shorter RNA products were observed, probably corresponding to further trimming of the 3′ end of the crRNA (FIG. 15B). Since this further trimming is performed by one or more proteins in the Cmr complex, this confirms that this systems are active within E. coli, at least at the level of crRNA processing.

[0330] Next, the present inventors designed an experimental system that would allow high throughput measurements of RNA silencing. For this, they first engineered into the CRISPR array four spacers that target green fluorescence protein (GFP). Next, they prepared a two-gene construct, which includes GFP and RFP, cloned on a pRSF-Duet plasmid that is compatible with the plasmids carrying the CRISPR system (FIG. 16A). This system allows fluorescence-based measurements of GFP and RFP expression following CRISPR activation. If RNA-silencing is active, reduction in GFP expression (but not in RFP expression) will be observed. The experiments were performed in a 96-well plate format, where both O.D. and fluorescence are continuously measured at 37° C. by a robotic plate reader (Tecan Infinite 200 Pro), allowing the testing of up to 96 RAMP variants in less than one day.

[0331] Fluorescence levels of GFP and RFP following induction of the RAMP module that expresses crRNA with four spacers targeting different regions in the GFP gene were tested (FIG. 16A). As a control, a similar measurement was performed except that the crRNA expresses four native spacers (not matching any gene in the E. coli genome). A clear reduction of GFP levels was measured, but only a subtle reduction in RFP, suggesting RNA-targeting of the GFP (FIG. 16B). These results provide support for the hypothesis that RAMPs can be used for RNA-silencing in bacteria.

[0332] In order to make a RAMP-based system in which any gene of choice could be targeted, the present inventors designed a unique repeat-spacer array construct, based on the repeat sequences of the Neisseria sicca RAMP module, in which any spacer of choice could be inserted using a simple blunt-end ligation and cloning reaction (FIG. 17). This construct comprises:
[0333] 1. A leader sequence upstream of the first repeat;
[0334] 2. Four repeats and two spacers originating from Neisseria sicca (not targeting genes in E. coli);
[0335] 3. Two consecutive repeats that naturally comprise of a unique blunt-end restriction site (for the ZraI restriction enzyme) which once cleaved can allow the insertion of any spacer to the CRISPR array using blunt end ligation;
[0336] 4. A targeting-spacer, non-native to the original Neisseria array that can complement any selected target gene. This component can be inserted to the original array via ligation.

[0337] Although the invention has been described in conjunction with specific embodiments thereof, it is evident that many alternatives, modifications and variations will be apparent to those skilled in the art. Accordingly, it is intended to embrace all such alternatives, modifications and variations that fall within the spirit and broad scope of the appended claims.

[0338] All publications, patents and patent applications mentioned in this specification are herein incorporated in their entirety by reference into the specification, to the same extent as if each individual publication, patent or patent application was specifically and individually indicated to be incorporated herein by reference. In addition, citation or identification of any reference in this application shall not be construed as an admission that such reference is available as prior art to the present invention. To the extent that section headings are used, they should not be construed as necessarily limiting.

The application's sequence listing, which the Patent Office published only in electronic form, follows.

SEQUENCE LISTING (1375 sequences)

SEQ ID NO: 1 - DNA, 36 bp, Myxococcus xanthus
gtgccgctcgccgtgatgccggaaggcgttgagcac

SEQ ID NO: 2 - DNA, 627 bp, Myxococcus xanthus
gtgacgtcactcgacctgctctatccggtccggggtggcccggtgccgctggaccatgggtatgcgctcttctccgcgctttgcacccgggtgcccgcgctgcatgaacgcttggacctgggcgtattcacgctgcgcggtgagcgcgccgtgggggacctgctgcacctgggccggggaacgctgcgcttgcgctgttcaccggaggtggtgccgctgctgctgtcgttgccgctcacgccactgaacgtcgctgggcgggaggtggtgctcggtgcgccggtgctccgcgcgttggaacccgcgtcgtcactcttcgcgcggattgtgactttcaagcatgcgctcgacgcggcgtcgttcctgcggggcgtgtcccgttcactcgaggcgctggcgtgtgatgcacgtccggtgctgggccgtcggcggctggtgcgtatcgccgggaagcgggtggtgggttacgcgctcgagctgcatggcgtttctggagaggactcgttgcgagtgcaggcacaaggcctgggcgggcgccgccacatggggtgtggcttgtttcttccgccgcgtcccgtggtgcggggcgttgtgccgcagctcggggaactcgcgcgggccgcgtga

SEQ ID NO: 3 - protein, 208 aa, Myxococcus xanthus
MTSLDLLYPVRGGPVPLDHGYALFSALCTRVPALHERLDLGVFTLRGERAVGDLLHLGRGTLRLRCSPEVVPLLLSLPLTPLNVAGREVVLGAPVLRALEPASSLFARIVTFKHALDAASFLRGVSRSLEALACDARPVLGRRRLVRIAGKRVVGYALELHGVSGEDSLRVQAQGLGGRRHMGCGLFLPPRPVVRGVVPQLGELARAA

SEQ ID NO: 4 - DNA, 1071 bp, Myxococcus xanthus
atgcgtgacgctttgggccgagtcgcggggcgcgtcgagaagacctcgcacgcggggctggtgtacgagcggtatgccccggagaagaagcatgagagccagagcggaccctgggaggcgtggctggctcgtctggaggcgcaccccgagccagacgattacgccgacgccttcattcgctggaaggactcgctccggcagtcgtacacggcgaccttcacggcgcgcgcggagagccgcctcttggtggggcatggcaacgcgtcacccacgggggtggggctgacgctgcaccacacgtggggcgtccccgtcgtgccgggctcgtcgttgaagggcgtgctcgcgggctacctgcgcgcggtgtacggcgatgccgcgatggaggcgcggcgcaggctcttcggtgtgccgggggaggatggcgaaggcgcgcacgctggcgaggtcatctttcatgatgcgcagtgggtgccgtatcggcgtgtcacgggcgcggaccgttcgccgacgttcctgtcccgggacgtgctcacggttcaccatgcgggttggtatggcggcacgtcctcgtggccgaatgactacgagtcgcccaatccggtggccttcctctcggtgcggccacgaggttgtttcctcgtggcgctgagcctggcgccagggatggaggcggatgcacaggcagaggcgttcctgaagtggaccgcgcagaggctggacgaggccctgcgccactggggcgtgggcggaaagacggcggcggggtacggcaggctggtgcgcgaagggccgttggagcttcagcgtccccagcgcccggtccgcgcctcgcccgcgctgacggagttcctgtcatgggtggaggctcggcgcgccgacaaggtggaacaacggcaagtcctggtgggcttcgaggcggagtggctggagcggttggtgtcgctggcgccggaggcgcgtgaggccggtgcgaaggcgctgcgttcactcgtcaagaaccccaagctcgaagcgcgcagggatgagttgctcgcgaggatgggcgtggccgtgggaggtcgtcggtga

SEQ ID NO: 5 - protein, 356 aa, Myxococcus xanthus
MRDALGRVAGRVEKTSHAGLVYERYAPEKKHESQSGPWEAWLARLEAHPEPDDYADAFIRWKDSLRQSYTATFTARAESRLLVGHGNASPTGVGLTLHHTWGVPVVPGSSLKGVLAGYLRAVYGDAAMEARRRLFGVPGEDGEGAHAGEVIFHDAQWVPYRRVTGADRSPTFLSRDVLTVHHAGWYGGTSSWPNDYESPNPVAFLSVRPRGCFLVALSLAPGMEADAQAEAFLKWTAQRLDEALRHWGVGGKTAAGYGRLVREGPLELQRPQRPVRASPALTEFLSWVEARRADKVEQRQVLVGFEAEWLERLVSLAPEAREAGAKALRSLVKNPKLEARRDELLARMGVAVGGRR

SEQ ID NO: 6 - DNA, 411 bp, Myxococcus xanthus
atgacggcgcagacgcgggagcagcagcgggcgctggatgtctatgcgcgggttcgcacggcgcgtgacaaaggcaaagcgttgtgcgcggagtacaagcctcgggtgaacggcctgggcgcggcggtgttgcgtgatgggctggcggcggcgctcgccttcctggaacgagaggtcaagagcaacgcggcggcccagcacctgttggaagacctgacgtggtgtctggagcgggcgcggttgccggggttgtcggagccgtccctgaagaggctgggcttgcctggcgccgtccgcgcgctggggctgaacgaatacatgctggccacgcgcgagtcgctccggctgttggtgtggttccgccgcgcggtgcaggccaccttccccctggaggagcgcgaacatgcgtga

SEQ ID NO: 7 - protein, 136 aa, Myxococcus xanthus
MTAQTREQQRALDVYARVRTARDKGKALCAEYKPRVNGLGAAVLRDGLAAALAFLEREVKSNAAAQHLLEDLTWCLERARLPGLSEPSLKRLGLPGAVRALGLNEYMLATRESLRLLVWFRRAVQATFPLEEREHA

SEQ ID NO: 8 - DNA, 954 bp, Myxococcus xanthus
atggagagccgaccctatcttcttcacgcgctgtccccgctgcacgtcggcactgggcagagcgtgggtgtcatcgacctgcccctggcgcggctgaaggccacgggaatccccttcgtcccaggctcgtcgctcaagggcgtgctgcgtgaattgcggcggcctcgcgaggagacgggcgacgcgcgagggctgcacgacgccgtcttcggcccccggcgggcgaaggcgggtccggagggggacgagccgggggactacgcgggcgcgctggtggtgggggacgcacggctgctcgcgctgccggtgcgcagcttcgtgggcaccttcgcgctggtgacctcgcccatgctgctcgcgctcgcgcggcgggacctgggcgggctgagcgggaaggagggggcctggccgaaggtggagccgctggcccagcgcggcgcgcgcgtggcgtccctgcgagacagcgccgtcgtgtacggcgcgggcacgtcggaggcttgcgtgtacctggaggacctggacctgcaggtggcctcgaaggatgacgcggctctgggcgcctgggcccagggcctggcggggctgctgccggaggcggagcgcgcgctgctgacgaagcggctggtgctggtggacgacgagacgatgtccttcctctgggagacagccacacaggtggacacgcgcgtgagcatggacccggagacgggcaccgcggcaaaggggcagctctggacggaggagagcctgcccgcggagacgctgctggtgggcgtgatgggcgccacgggtaccttcaacaaggcgccgcgcaagttggcggcggacgcggtgctggatgcggcgtttggcggcgagggcacggtgctccaactgggaggcaaggccaccgtggggcgcggccggtgccggctgctggcctggatggctccggatgcgcgaggtgggcgatga

SEQ ID NO: 9 - protein, 317 aa, Myxococcus xanthus
MESRPYLLHALSPLHVGTGQSVGVIDLPLARLKATGIPFVPGSSLKGVLRELRRPREETGDARGLHDAVFGPRRAKAGPEGDEPGDYAGALVVGDARLLALPVRSFVGTFALVTSPMLLALARRDLGGLSGKEGAWPKVEPLAQRGARVASLRDSAVVYGAGTSEACVYLEDLDLQVASKDDAALGAWAQGLAGLLPEAERALLTKRLVLVDDETMSFLWETATQVDTRVSMDPETGTAAKGQLWTEESLPAETLLVGVMGATGTFNKAPRKLAADAVLDAAFGGEGTVLQLGGKATVGRGRCRLLAWMAPDARGGR

SEQ ID NO: 10 - DNA, 1206 bp, Myxococcus xanthus
atgagtgacgcgagcttcgcgctgctgccgcgtgacggcctgtcggccaaggacgggcgaggttggtacacgtcggaggtggggcgtgggtactccttgccgtggcccctgcccaccacagtgcggggcgcccttcgcgccgcctgggggcatgacgccatggcggtcagcggtgcggtcctggccccggatgaatgggagcgctgctcagaggaggtccggttgcggcacctcgtcgcgctgcgccgcccgttgggcgagtccttctcgttggcccaccgcatgtggccgtttcccgcggatgctgtgtgcgtgcgcgacgcggacgggtccgagcatctggagcggttggagccacgcccggatggggccgccacgctgggcccggatgacgacgacgcgcgcgaggcgctgtggcacccgcgccggaactcgagcggaaagcccatggccgcgcccctgttctggcccgaggcgcggatgatggcgtggctgcgcggcgcggtggagccgtcctccgagacaccggatgcgctgaccccgcgcacggacatccacctggccatcgacgtggagacgcaggcgtcgcaggactcgatgctgcactctcgtgaggtggtggagttgctgcgcctccagcgccactcggggcgaactcccgtgctggaggagtgggcgctgggactgagctgcgcgtggccggcccccgcgagcggcgctccgcgcgggccgctgggcctgggcggccggcgccggctgtcggccgtggagccactgaaggtggacctcttcgcgattccggatggcgtggcccgggcgacgcgaggactgcgcctggtgctggccacgcccgcggagttccaacgtggctggttgccggacggcttcgagcgcgtggctgggacacccccacgttacgtgggccggctgccgtgcatcgacgcgcccgtggtgcttcgggccgcgctggtcccctggccgctggacgtgtccggctgggacatggtgcggcggcggccccggcccacgcggcggtgggtgcccgcaggcgccgtctacttcttcgagaaacacagcggtggggacttcaccgccaacgagctgcgagcgctgtggctggcctcctggggcggcggccacgcggaggcgctgggccaggtgctgcccggcgtgtggcaaccgccccgtcacggacaaggagcctga

SEQ ID NO: 11 - protein, 401 aa, Myxococcus xanthus
MSDASFALLPRDGLSAKDGRGWYTSEVGRGYSLPWPLPTTVRGALRAAWGHDAMAVSGAVLAPDEWERCSEEVRLRHLVALRRPLGESFSLAHRMWPFPADAVCVRDADGSEHLERLEPRPDGAATLGPDDDDAREALWHPRRNSSGKPMAAPLFWPEARMMAWLRGAVEPSSETPDALTPRTDIHLAIDVETQASQDSMLHSREVVELLRLQRHSGRTPVLEEWALGLSCAWPAPASGAPRGPLGLGGRRRLSAVEPLKVDLFAIPDGVARATRGLRLVLATPAEFQRGWLPDGFERVAGTPPRYVGRLPCIDAPVVLRAALVPWPLDVSGWDMVRRRPRPTRRWVPAGAVYFFEKHSGGDFTANELRALWLASWGGGHAEALGQVLPGVWQPPRHGQGA

SEQ ID NO: 12 - DNA, 1791 bp, Myxococcus xanthus
atgaaatacgtcgtcgttctcaaagaggggccggtgcagggctacatcgcccagtctcgccgcacgcgggacctctggtacggcagccacctgctgtcgaatctggcgcgaaccgtggcggtctccctcacggagtctggtgcgacgctggtcttcccgcatccggagcaggcgaaggacacgagcaccggcgtggccaacaaggtggtcgcgctggtggaggacgcgcccgagcaggctgcacggaacgcgcggcgcgcggcgaaggagcggttgctcaaggactggcgccgcgtcttcaagacgtgcgagtccatgctcatccccgaggcgtccgtgctggccgaggagcaactcgacaccttccttgagatccacgctgcctgggcacccatcgcggacacgcccacgggttacgccgacgcgctgcacgaggcggagcgtgccctggaggcccgccggggcttgcgtgagttcgtgccatggaagcagccgccgccggcgggcacgcacaagtcgagcctcgacggcgctcgcccgtcattgctgcgacgcgagcgtcacgtggggcacctctggcgtgacttccgcattggcctgcgcgaggagctggatgcgctcggggtgctcaagcgcgtcggcggcaatcccggccagttcgtgcccgtgccctccatcgggatggcggcgtggctccagaccgcggccacgcgacacccggcgctcctcgccgcgctcaaggccgagtgcgcgcgccgcgggttccagacggtgagcgtgaggaatcgtccctgggtggaggccttcccctacgacggccagttgttgctgcccgagcgcgtggccccgtacttcgaggagtacgccgtccccgatgcgcgtcaggccgccgcgcgtttcgtccacgagttcgtggagccgcttcgagacgctgtgcgcgccgagcccttcccttacgtggcctgcctggtggcggatggagaccgcatgggccgcgcgctggaggcgctcgcgaggcagccggacggccacgccgcgcaccaacgcatctcccgggcgctcgcggacttcacgcggcaggcgaagacgattgtcgaagtggagcatcggggcgtgctcgtctacgcgggcggcgacgatttgctcgccttcgtcacgcccatggacgcgctcgcgtgtgcccaggcgcttgccgttgccttccgcgccacgctggaagcggcgctggcgggaacgcgcgcggaggtgcccacgctctctgtggggctgggcattggccacgtcctggagagcctgggcgagctgctggagctgggccgccgggcagagcgtgccgcgaaggacgcgggtcgcgacgcgttggcagtgctggtggcgaagcacgccggacgtgagcggctgtggacggcgccgtgggccaccgaccccgtcgagcggctgacgcgggacatggcgctgctgtcgagcgacacccagccgctgcccttgaagaaggttcatgaggtggcggccctcgcgcgccgcttcccgtctggcaccaccatcgcgcccgagctggctgagctgctgtcggatgaggccgcgcgcatcctcgcccgggcggaggcggggcgttcgcccgtgaagctcaccccggaggccgtgggcttggagctgcccacgtcgccgaactccctcgagccaccccatgcatcgctggaccgatgggcatcccggctgctggtggcggatgtcctcgcccgggccagcggaaagctcattcccgcgagcgacaaggaaggtgtgagatga

SEQ ID NO: 13 - protein, 596 aa, Myxococcus xanthus
MKYVVVLKEGPVQGYIAQSRRTRDLWYGSHLLSNLARTVAVSLTESGATLVFPHPEQAKDTSTGVANKVVALVEDAPEQAARNARRAAKERLLKDWRRVFKTCESMLIPEASVLAEEQLDTFLEIHAAWAPIADTPTGYADALHEAERALEARRGLREFVPWKQPPPAGTHKSSLDGARPSLLRRERHVGHLWRDFRIGLREELDALGVLKRVGGNPGQFVPVPSIGMAAWLQTAATRHPALLAALKAECARRGFQTVSVRNRPWVEAFPYDGQLLLPERVAPYFEEYAVPDARQAAARFVHEFVEPLRDAVRAEPFPYVACLVADGDRMGRALEALARQPDGHAAHQRISRALADFTRQAKTIVEVEHRGVLVYAGGDDLLAFVTPMDALACAQALAVAFRATLEAALAGTRAEVPTLSVGLGIGHVLESLGELLELGRRAERAAKDAGRDALAVLVAKHAGRERLWTAPWATDPVERLTRDMALLSSDTQPLPLKKVHEVAALARRFPSGTTIAPELAELLSDEAARILARAEAGRSPVKLTPEAVGLELPTSPNSLEPPHASLDRWASRLLVADVLARASGKLIPASDKEGVR

SEQ ID NO: 14 - DNA, 1491 bp, Myxococcus xanthus
atgtcctctctggttctgcctgacccaccttcatccgaagccattcacttgcgccggcgcttcgccaaggggccgaagctggcgtccttcacgctggccttgaagaccttcacgcccatcctgggaggagggccagtggcgcgaagcccggacctcccctccgtggacatcatccgggtccccacgctgcgcgggcacctccgcttctggtggcgcgcgctgtacggccacgcctacgtggggcggggcgcggaggcgctggcgcgtcgggagcgcgagctctggggcggcatggggcgggcgaagaaggggccaggggatgatgaggcgcgtgcctggcgctcccaggtggagttgcgggtgttggacgtccgtcccgagggagaggacacgaagcccatcaacctcggcaccacggcgggttatgcgctgtggccggcgcgcaaggggaagaacgagcaggcagacatccctcgttgggctccgggcctccagttcacgctggaggtcatcgcacccgagggtgaggacatggcccaggtgcgcaacgcggtgcgagcctggattctgtttggggggtatggctcgcgtggccggcgcggctgcggctccgtgtgcctggcggcctcgggccccgttgccgcggagtggctcccggcctccgcggaccgggcatcgcttcggcgcctcttcggggacgtgccgctcttcgcgcctgagcaggcggcggatgcctgtgacatgcctctgctgcggggcgcgcgcctcttccgggggaacgcgggcgccaagccgcgtgacgggagcgaggtctggttgatcgcgctcaagtggctgcgggaattccgccagggcaccgagcccgcgcccgccgggagtgctgaacaggtgggaatcgcgcgcaagcctggtgaaggaaatcgcgcgggccgctccaactggccggaggccgacaagattcgccgcttcgcccggccatctggcaaggacagccgaggcggcttcgctccaaggtccgagggcaaggcctatcccgaggtccacgctccgcgcccacagcactcggcgaccgcggcctggccgcgcgctggcttcgggttgcccattgtcttccatttccagcagaagcggcgcgaggacaatgactactaccagccgaaggagcccgaggacatccagctccagtgggaggagagcggttcggagaagctgatggaccgcctcgcatcgccgctcatcgtcaaggcgctgccgctggcggatggccgcttcgagcccatcgcgctgtggctggagcgcggagcgcctcggggtggacaggtcgtcatgacgcagcgggggacggcagtcccacggacgcgggttccttttgaaagcagcttccgggcccgcgatgaccaaccccttttccagacactccagcaggcggacaacctacgcgacgccttcttctggtggctggaggaaacccgccgtgcccaggaggcgtga

SEQ ID NO: 15 - protein, 496 aa, Myxococcus xanthus
MSSLVLPDPPSSEAIHLRRRFAKGPKLASFTLALKTFTPILGGGPVARSPDLPSVDIIRVPTLRGHLRFWWRALYGHAYVGRGAEALARRERELWGGMGRAKKGPGDDEARAWRSQVELRVLDVRPEGEDTKPINLGTTAGYALWPARKGKNEQADIPRWAPGLQFTLEVIAPEGEDMAQVRNAVRAWILFGGYGSRGRRGCGSVCLAASGPVAAEWLPASADRASLRRLFGDVPLFAPEQAADACDMPLLRGARLFRGNAGAKPRDGSEVWLIALKWLREFRQGTEPAPAGSAEQVGIARKPGEGNRAGRSNWPEADKIRRFARPSGKDSRGGFAPRSEGKAYPEVHAPRPQHSATAAWPRAGFGLPIVFHFQQKRREDNDYYQPKEPEDIQLQWEESGSEKLMDRLASPLIVKALPLADGRFEPIALWLERGAPRGGQVVMTQRGTAVPRTRVPFESSFRARDDQPLFQTLQQADNLRDAFFWWLEETRRAQEA

SEQ ID NO: 16 - DNA, 32 bp, Bacillus halodurans
gtcgcactctacacgagtgcgtggattgaaat

SEQ ID NO: 17 - DNA, 1377 bp, Bacillus halodurans
gtgaaatcatcaaaaagagtgccaaatctgacatttgaaaagttagaagaaactttaaatacactgaaagaaagggcagataaaacaaaagagtctttaaatatttcaatcattacacatatgtttggtggtggtacaaaggctggacaagttgataaagaaatacctgttaggtcaacttctattcgtggaaacttgcgattttggtggagagcaactcgtggtgcgatgtatcccaatgtcaagtcactaaaagaggcggaagcaaagatttttggggatacgaatcgacctagtgctgtaaagatatcggtaagtgaaactggggatgctaaatgggcccctatactagaaagaaaaaacaacagaaggttgcattcaagcctatctaaatataaatatgttctcttcccctttgaagatcgaaaaagggacaaacatcaagatcatactgattatttaaacactgactctccttatacatttacacttcaccttgagtacatccaatttgaagtggataacataaatataagagatgaggttcatgccgccttatgggcatggattaattttggtggtttaggagcaagaacaaggagggggtgcggaagcttatattgcaagagcttctctcctccaaaggatacccaaactcctgaagctctaaagcagtggttcgccgatagagtaaaaaaatataagataaaagtagactctacttcgagaaaagagtggccgacgctacaacaaatatttatcaagtctagtaactctaaattacttagtcctcttcaagcatggcaatttgtcgtttttcattatagccagtttcgtggcttatcaaatgggaaaagagggagaagccattggccggaaccagactctatccgccatatgacgagaatggctgaagaagaccataaaacctcagttacgatagaaaaagaagatgcgaatattgcatttccaagggctcaatttgggttacctgtaatttttcaattccattctaaagaccgtcaagacccttttcctacgatccttaagccaagaggaaaggatcgtttggcttctagactcattataaaagcggtaggcgtatctgaaagaagtgcatttcctattgttgttacactaaaccaaccggaaatagaagaagtggagctcagtttaatgaaagaagtaaaaactgaagaacaaaaagaagtcaaagagcaattagacaaatacaagggcaagcttaagcgagacgtcgtttaccctaaaaacttaaactatcaaaaatacccaatgaaagaatctacttcagctgtagaagcatttattaaaaaggggggaagtatatgggagcgcgcccttccagaaaaaccttga

SEQ ID NO: 18 - protein, 458 aa, Bacillus halodurans
MKSSKRVPNLTFEKLEETLNTLKERADKTKESLNISIITHMFGGGTKAGQVDKEIPVRSTSIRGNLRFWWRATRGAMYPNVKSLKEAEAKIFGDTNRPSAVKISVSETGDAKWAPILERKNNRRLHSSLSKYKYVLFPFEDRKRDKHQDHTDYLNTDSPYTFTLHLEYIQFEVDNINIRDEVHAALWAWINFGGLGARTRRGCGSLYCKSFSPPKDTQTPEALKQWFADRVKKYKIKVDSTSRKEWPTLQQIFIKSSNSKLLSPLQAWQFVVFHYSQFRGLSNGKRGRSHWPEPDSIRHMTRMAEEDHKTSVTIEKEDANIAFPRAQFGLPVIFQFHSKDRQDPFPTILKPRGKDRLASRLIIKAVGVSERSAFPIVVTLNQPEIEEVELSLMKEVKTEEQKEVKEQLDKYKGKLKRDVVYPKNLNYQKYPMKESTSAVEAFIKKGGSIWERALPEKP

SEQ ID NO: 19 - DNA, 1815 bp, Bacillus halodurans
atgggagcgcgcccttccagaaaaaccttgatgcttttttcgattggtcccgtacaggaatttatcgctcaggctaggaagacaagggacctttggtttggatcacatttgctatcagaattaggaaaagcagcagcgtttaaattaagtaagctagaggctcacgtcatttttccttatgttgaaaatctcgagaagcttgatgctaaggaaaaagaaaaaataaattcgcctaaccgggttatggcccttgtagatacaagtgaacctaaagcggtggcacttgaagtaaaagctgccgtgattgagaagtggatgagttatgcaaatggagcacgccgtttattgggcagggacatcaatccagcactttggaaacgtcaagttaaagatttgattgagttccatgcggtttggatggattgtaaggaagaagcacactatgcagaggtgagacaaaaagctgaagaactgttggcagctagaaaaacgcttagggattttaagccgaaccaaccaagtcatatgtatggagaagtcaaatctagccttgatccaggtagggaatgtgttcttgagaaacatcaatacaagagatacgctccatatggtataaagaaagacgaatcattagatgccatatctcttgtcaaacgtttgtcttttcacttgtctccaaatactaggcattttccttctgtctgtgatgtggcgtttagccaactaaggagaaaaatagaaaaagacaatttgttaactgatcttgcgaagaactatcaagaatgggtctggaacaagtatccgaagttgaaaaagcgtttgttttctgatttattcgattctcggttgttttatgtgactcacattaaagaaatggtggagggagcatatccaaacaaaaatgagcaagagcagatcataaaactgattgcacagaagttagaatccttttataaggaaactaaacttaactctactccttattatgcctttttggtgtgtgacggtgatcagatggggaaggcgcttcggaacctaaaaaacattgaggatcatcaagcattttccaaaaaactatcagaatttgccgcaaaagctcgaaagatcgtaacgacagacaagcgtgatgaaggcgaacttgtgtatgcaggaggcgacgacgtgatggcatacttacctttgcatcgttgcttagatgtggctgctaagttacagcagctttttggagagcttatgaacgaagcacttccgaaagaagcagtgcgtccaacgttatccgttggaattgtcattgcccatatgatggaacctatgagtgaagtccgtaagttagcaatggctgcggaaaaacaggcaaagcgcaaaagaaatgaattagctattttctttcaaaagcgaagtggtggagaccgcatgcgctttagtgtttcatttgatactgaaccgacacgtaatattaagaaaatacttaagttttattatagaaacgtcatgtcggttggaatcgcccatgctatacagtctttacatacagaatacagtggccttcttcaaaatcaattggtaatgagtgaagagaggttggaaaaattgttagaacaagaagtcagccgcctcgtttggaagaaacggtcgagcggtattgacgatgaaactgtgaaaagctttgaaacgtgtatcttgggactaatgcgcaaaggaaagggttctcccttagagcgcttggatcgtcttgttcaacaaatgatggttgcgattcaattagagaaagcaggtgattttaccgatgcgacagattcgaattcgtccacttga

SEQ ID NO: 20 - protein, 604 aa, Bacillus halodurans
MGARPSRKTLMLFSIGPVQEFIAQARKTRDLWFGSHLLSELGKAAAFKLSKLEAHVIFPYVENLEKLDAKEKEKINSPNRVMALVDTSEPKAVALEVKAAVIEKWMSYANGARRLLGRDINPALWKRQVKDLIEFHAVWMDCKEEAHYAEVRQKAEELLAARKTLRDFKPNQPSHMYGEVKSSLDPGRECVLEKHQYKRYAPYGIKKDESLDAISLVKRLSFHLSPNTRHFPSVCDVAFSQLRRKIEKDNLLTDLAKNYQEWVWNKYPKLKKRLFSDLFDSRLFYVTHIKEMVEGAYPNKNEQEQIIKLIAQKLESFYKETKLNSTPYYAFLVCDGDQMGKALRNLKNIEDHQAFSKKLSEFAAKARKIVTTDKRDEGELVYAGGDDVMAYLPLHRCLDVAAKLQQLFGELMNEALPKEAVRPTLSVGIVIAHMMEPMSEVRKLAMAAEKQAKRKRNELAIFFQKRSGGDRMRFSVSFDTEPTRNIKKILKFYYRNVMSVGIAHAIQSLHTEYSGLLQNQLVMSEERLEKLLEQEVSRLVWKKRSSGIDDETVKSFETCILGLMRKGKGSPLERLDRLVQQMMVAIQLEKAGDFTDATDSNSST

SEQ ID NO: 21 - DNA, 1272 bp, Bacillus halodurans
gtgattttaccgatgcgacagattcgaattcgtccacttgacccgttaatggtaagagatggtcgccctttcaaggatagtcctggggcacgtgcatacagcatgatggatgttgtgcccggggtgatagcaggaactgtgcgaaccatgttagcagaacaagctgcaaaatcttcccgagtagtagattatcatacattttcaaaagtacccgtatacggcccgttatatgtttggaaaggtaagcctttctttccgcttccaagtgacattggattttatgaagatgagaatggggcactacaaatgaattataggcaacctcagccattagtgaatggacagggctatcttggaataggggacaaaggggatcatgaatcgctttggcctgcaaaagtcattcctcaaatgggtaaagtgtcatcgattgtccctgcttatctttctttagattggatgtcgcgctggttaagaggggatttgtctccaaaatcttggacaagcccacttgccgaatggcagcaactagtaagagataacaaactggattctacggataaggatgttcattttttacccccttttgcccttgatgagcgtgatcatattgcggttgaagcgggaaccagaatggcgaaagatcaagcgctttttacgacacaatccatcgtgtttccaccggatttggatatgcatgcccgtgtcgaaattccgcaagaagctgcttggcctatgcagttgtcaacactccattctttaggtggcaaacgacgattggctcattttagtgaaagccaagatgatcagttttggcaatgcccggaagcattagaacaatctttagatgagtcacagtatgtacgattagtattagctacacctgcttactttgcaaaaggttggaagcctaggtggctagatgatgagctttgtacaaatgaaatttttgcaaaagaaataagtcgtgaagtgaaattgcaattagtatgggcgtgcatctcaagatggcagcctgtttcaggatggagttattctcttaaacaaccaaaagcagttcgccgtatggttcctgcagggagtgtttattttttcaaggttacagaaggaaatccaagggagttggcgcggcgaggttggttaaacacagtctctgatgcaaataggcgcaaaggcgcttttgataaggaagatggctttggtctagctttatgggggacatggcgaccagatgagaacgatatagatagtgaaaaggagtgtgaagtttaa

SEQ ID NO: 22 - protein, 423 aa, Bacillus halodurans
MILPMRQIRIRPLDPLMVRDGRPFKDSPGARAYSMMDVVPGVIAGTVRTMLAEQAAKSSRVVDYHTFSKVPVYGPLYVWKGKPFFPLPSDIGFYEDENGALQMNYRQPQPLVNGQGYLGIGDKGDHESLWPAKVIPQMGKVSSIVPAYLSLDWMSRWLRGDLSPKSWTSPLAEWQQLVRDNKLDSTDKDVHFLPPFALDERDHIAVEAGTRMAKDQALFTTQSIVFPPDLDMHARVEIPQEAAWPMQLSTLHSLGGKRRLAHFSESQDDQFWQCPEALEQSLDESQYVRLVLATPAYFAKGWKPRWLDDELCTNEIFAKEISREVKLQLVWACISRWQPVSGWSYSLKQPKAVRRMVPAGSVYFFKVTEGNPRELARRGWLNTVSDANRRKGAFDKEDGFGLALWGTWRPDENDIDSEKECEV

SEQ ID NO: 23 - DNA, 912 bp, Bacillus halodurans
atggaacttaattcgagtcaattgttctttgtccattgcctttcaccggttcatatcgggactggtgaaggagtgggcttgattgatatgccaattatgcgcgagcgtgtaacgaaatggccgttaattcctggttcgacaacaaaaggagttcatcgggattactttgttcaacaaagggataaggaatcttggattcgcacagcttttggtgcaggaaaaggagaagcggatgctgaaggaaacgcaggctctattgttatgtcagatgctcgtatacttgcatttccagtagcaagttactacggaacgtttgcctatgtgacttgcccaatggtgatcaaacgccttgagcgtgatatgggagcagccaacgtttcgtacttctctaatcttatcgaaaaagtagaaggttgggagaaaaaactatcaactaatgaagataaagctttaattggacatagatgcgaagtgacggatgaaaacaatgagaagatttatcttgatgaatttgagctatcagtcgtaattgatggcacatttggagagttaacaaacagtttagcgaagttggtatttaaagatgaccatttttcacaagaattacttgccagcaggttagtgttggtttctgatgaatcttttcagtattttgtgacacaatgctctgaaattacgccaagaatccgcctaaaagcggaagagaaagtagtagatgatggtgcgctgtggtatgaggagtatctaccgaccgagaccttgctgtatggtttgatctggtgcgaaaagatggatcaagtgaaagagagctggaaaaggctttcgaagggaagggtattacaagtgggtggtaatgctactgttggtagggggcgtgtacgttatttatataccggaggggattactcatga

SEQ ID NO: 24 - protein, 303 aa, Bacillus halodurans
MELNSSQLFFVHCLSPVHIGTGEGVGLIDMPIMRERVTKWPLIPGSTTKGVHRDYFVQQRDKESWIRTAFGAGKGEADAEGNAGSIVMSDARILAFPVASYYGTFAYVTCPMVIKRLERDMGAANVSYFSNLIEKVEGWEKKLSTNEDKALIGHRCEVTDENNEKIYLDEFELSVVIDGTFGELTNSLAKLVFKDDHFSQELLASRLVLVSDESFQYFVTQCSEITPRIRLKAEEKVVDDGALWYEEYLPTETLLYGLIWCEKMDQVKESWKRLSKGRVLQVGGNATVGRGRVRYLYTGGDYS

SEQ ID NO: 25 - DNA, 378 bp, Bacillus halodurans
atgaaatctctcgatgcccattatgccaatattgcactgcaaagtattcaggaacttgaaaaatcggatgaagcatttaaaacttcctttggaagcttgtgccatcagtttccatcaatggtgaggttaaacggattaaggttgacggtcgctttttatgaatcaaagaaggaaaacacggctcatgcacgttatttagcagggctcaaagcagcactgggggttagcatttcggcgaatgacatacctgaaagaggagcagagtatcggcgaatgactgaacaagctttgagggcatcaatttggtttaagcgatatgcagaagcgattttgaaatgttctccaacttcagagcctgtccgggagggagacgtatga

SEQ ID NO: 26 - protein, 125 aa, Bacillus halodurans
MKSLDAHYANIALQSIQELEKSDEAFKTSFGSLCHQFPSMVRLNGLRLTVAFYESKKENTAHARYLAGLKAALGVSISANDIPERGAEYRRMTEQALRASIWFKRYAEAILKCSPTSEPVREGDV

SEQ ID NO: 27 - DNA, 747 bp, Bacillus halodurans
atgaatgcctatttgacacttacaaagtataaaggctctcaaaagaagtcggatttacttaagcagatagataatccagacggaaaaagtgctttttttgagcaagctatactcgattttggaaattattggggaacaaaaaacgttagttggtataaacaacgttatgctgcttatgagggtcacatcaagtcaagcagtgacacaaatacgtcatttttccttaaaagtagttttcctttgatcattggtcagggtaatccttcgatacttgaaacacaccttacgcttcaccctatttatggaattccatatttacctggatctttaataaaaggggtcacagcccactattgtcatcaagtattagggaaagaggattctaaattcaaacaaggagaagagtacgcactcgtattgttcggctcacaagaacaggctggagcaattcactatcatgacgctctgcccactccaaaatccattaaaaattgcttatcgttagatgtgattacaccacatcatcaatcctataatcaaggtcttaatcaagctccaagagacgatgattcacctgttcctgtgccatttttgacggttaaagctgatttcagggttatcctaagctgcgaagacctcgcttacgctgaatggctaaacatagcacagaaaattgtaagccatgctgtgactgagatgggtataggtggaaaaacaaatgcgggttacggaaaaatggaggtatga

SEQ ID NO: 28 - protein, 248 aa, Bacillus halodurans
MNAYLTLTKYKGSQKKSDLLKQIDNPDGKSAFFEQAILDFGNYWGTKNVSWYKQRYAAYEGHIKSSSDTNTSFFLKSSFPLIIGQGNPSILETHLTLHPIYGIPYLPGSLIKGVTAHYCHQVLGKEDSKFKQGEEYALVLFGSQEQAGAIHYHDALPTPKSIKNCLSLDVITPHHQSYNQGLNQAPRDDDSPVPVPFLTVKADFRVILSCEDLAYAEWLNIAQKIVSHAVTEMGIGGKTNAGYGKMEV

SEQ ID NO: 29 - DNA, 26 bp, Candidatus Korarchaeum
gtctcgatgaaaagaggattgaaaga

SEQ ID NO: 30 - DNA, 1026 bp, Candidatus Korarchaeum
gtggagacgacgcaatacggtcatctcctcatagacggtttcggggtctccctgaggaagaggagggggaggatcctcatactatctaagggggagaagaaggagatcccgatgaaatccgtgaaggaggtcgtcataatagggaaggcagctttatcatcagagctcctcaaagccctagctcaatccgggactgatcttctgatagcgacgcccaccgggaggccggtggctagactcatcccagctaaggccgggggtacagcgaggaataggtacgagcagtacaaatcgctcgaggataggagggggatcgagatagctagagctgtgatagtcgggaagataaggaatcaggcctctaacctcagttactactctaaggcgaggaggatggatgaggagctctcttcggagctatacgatgcagctcagcagctgaagagggagatggaggagctcaagaatgaggagttcccggatatcgatgaagccaggaagaggataatggctagggagagcaagtgcgcgaacatatattgggagaagatagcttctataatggaggagtggaagttcagggggagggagaagaggacagatctcgagggcaacgtgatagatcctgtgaacctctgcttgaatgtatgctataacctcctctcagcccagatatggaagaacgtcctcaggttcggcttggatccgttcctaggttacctgcatgtggagagaccggggaggatctcccttgtctacgacttgatggagcccttcaggcctatggtcgataggttcgtattctcttacctcagggggatgtcaccatccctcttctcaagcaatatagtgagcggtaccattgcatccctgaggagcaggttcttctccgatttcatgaactggaggctggattacaaggggaggaagctggggatggagactatcatgttcttatacgtcagggatatagtttccttcctcaggggagggaaggagcccacgatgccctacatcccctggtga

SEQ ID NO: 31 - protein, 341 aa, Candidatus Korarchaeum
METTQYGHLLIDGFGVSLRKRRGRILILSKGEKKEIPMKSVKEVVIIGKAALSSELLKALAQSGTDLLIATPTGRPVARLIPAKAGGTARNRYEQYKSLEDRRGIEIARAVIVGKIRNQASNLSYYSKARRMDEELSSELYDAAQQLKREMEELKNEEFPDIDEARKRIMARESKCANIYWEKIASIMEEWKFRGREKRTDLEGNVIDPVNLCLNVCYNLLSAQIWKNVLRFGLDPFLGYLHVERPGRISLVYDLMEPFRPMVDRFVFSYLRGMSPSLFSSNIVSGTIASLRSRFFSDFMNWRLDYKGRKLGMETIMFLYVRDIVSFLRGGKEPTMPYIPW

SEQ ID NO: 32 - DNA, 933 bp, Candidatus Korarchaeum
atgtactacgtggacccagtggaggtgaagaagttatcgagggacctcctcccggcttccagggagaggcccgtcgatgagaggctgaggggctggaattggttccagagccccctgaggccctactcctctgaggtccctttaggggtctgggagatagcatcatccatatgccccaccggcagggacgtatggataaggcacaaggtactgaggagatccgtgcccacgacgccccagatagctaagggaatagtggtgcacaggctggtttcctcaatgttccttaaggctaagaaaatggtttacatggggaaatatgagctaagagatgatttgatcacggagtccgaggggatagtggagagggagctcgagaacatgaggaagtacgtgaagctaccggatgaggaggggctgaggggtttctgcaggaggatagccagatgggaggccacgaggatagaggggaaggtcatggaagtaagggctaagtaccccttcctgaatgaggagagcctcgtccagatagccttccccgtcgctacggagctagctatagacggcagcctcctggggctgagccagtacctgagggcagatgctgcctggatcttcggagggatactgttcgatgtgaagaccgataggaaggaggattggcacaggattcagctagctggctatgctttggcttttgagagcttcttcgagatgccagtcgatatagggtgcgttgtctacgtatctgaagtgcccgagggcctcagggtgttcagggacttcttcctgataacagacgatctcaggtccaggttcctggagaggagggatgagctccagatgatgctcattagggaggatgagcctaagagagctgagaggtgcccgaaatactgcctcttctccgatatgtgcggggtggtaacctga

SEQ ID NO: 33 - protein, 310 aa, Candidatus Korarchaeum
MYYVDPVEVKKLSRDLLPASRERPVDERLRGWNWFQSPLRPYSSEVPLGVWEIASSICPTGRDVWIRHKVLRRSVPTTPQIAKGIVVHRLVSSMFLKAKKMVYMGKYELRDDLITESEGIVERELENMRKYVKLPDEEGLRGFCRRIARWEATRIEGKVMEVRAKYPFLNEESLVQIAFPVATELAIDGSLLGLSQYLRADAAWIFGGILFDVKTDRKEDWHRIQLAGYALAFESFFEMPVDIGCVVYVSEVPEGLRVFRDFFLITDDLRSRFLERRDELQMMLIREDEPKRAERCPKYCLFSDMCGVVT

SEQ ID NO: 34 - DNA, 282 bp, Candidatus Korarchaeum
gtgcggggtggtaacctgaaggtcctcgtggtctacgatataactgacgactcgctgaggctcaaggtagcggagatactcaaggacttgggattgttcaggatacagaagagcgcattcataggagagatgacgagccaggagagggagaatatggaggaaatcctgaggagacagaatctcgggccctcggacaggatagatgtattccctatatgcgatagggatctgaagatgcacagtcagatagggagggggaagtttggaaggggtcctccttag

SEQ ID NO: 35 - protein, 93 aa, Candidatus Korarchaeum
MRGGNLKVLVVYDITDDSLRLKVAEILKDLGLFRIQKSAFIGEMTSQERENMEEILRRQNLGPSDRIDVFPICDRDLKMHSQIGRGKFGRGPP

SEQ ID NO: 36 - DNA, 546 bp, Candidatus Korarchaeum
ttggaaggggtcctccttagcgtcagggagatagaggagtacttcttctgccctctcctcttctactacaagaactacctcgggatagatacgcaggagggcttctgggcttatctcgggaagagggcccaggaggaagctgaggaagagataaggaagaggtttgagatcctggggaaggaagttgagctgaggagcgataggttaggtgtagtggggaaggtagatttcatagtggggaggggaagggagatcatgcccctagaggtcaagttcagcgggaggctgaggccatggtggaagtacagcatctccctctacgccatgctcttggaggactccattgggaggcccgtgaagtcgggagtagtgctagtgaccaggggcatgaggttcatagaggtgagggtaggggacagcgagaggaggttcgtgctcggagccatcgagaagtgcaggaggataatggagggggagatcccgagagcttatagatctaggagctgtgagaattgcgatttcaagaatagatgcctagagatatag

SEQ ID NO: 37 - protein, 181 aa, Candidatus Korarchaeum
MEGVLLSVREIEEYFFCPLLFYYKNYLGIDTQEGFWAYLGKRAQEEAEEEIRKRFEILGKEVELRSDRLGVVGKVDFIVGRGREIMPLEVKFSGRLRPWWKYSISLYAMLLEDSIGRPVKSGVVLVTRGMRFIEVRVGDSERRFVLGAIEKCRRIMEGEIPRAYRSRSCENCDFKNRCLEI

SEQ ID NO: 38 - DNA, 636 bp, Candidatus Korarchaeum
atgagagtcgctctaatatctacgctcggattcgaggagaagttctgctatagagcgatattaaggcatggaataaaggaaggggacagaataattctttttacggcagaattggttgaaaaagttgagaaagcatacgattggataaggaaactcgttcagagctcatacggggactctgtcagggtggatctaattcaattagaccctatgaacccagttagatcgataaaagttgttctaaaatacttggatgagttgaaagatttcaagataatcgtcaatttgagcggggggatgagagcaatcgtcatctacgtgctgctggcctgcatgatgaggctcagggaggatatgataatagaggtggaggcggaggacctctcaggcttatctaagctggactcaaatatgctgaagctcgtgaaggagggaattaaggaggagtggatcgatttgctcgagtgcatagctgagggatccggtgatgtgagctctatagctaggaaactgaggaaggataagagcacggtgaggaggcagctctcatctctagagaggagcggcttgataaggatgaagaagaggaagcctatgacagtagagctctccgagctctcggagctcatcctctaa

SEQ ID NO: 39 - protein, 211 aa, Candidatus Korarchaeum
MRVALISTLGFEEKFCYRAILRHGIKEGDRIILFTAELVEKVEKAYDWIRKLVQSSYGDSVRVDLIQLDPMNPVRSIKVVLKYLDELKDFKIIVNLSGGMRAIVIYVLLACMMRLREDMIIEVEAEDLSGLSKLDSNMLKLVKEGIKEEWIDLLECIAEGSGDVSSIARKLRKDKSTVRRQLSSLERSGLIRMKKRKPMTVELSELSELIL

SEQ ID NO: 40 - DNA, 327 bp, Candidatus Korarchaeum
atggaaaacatcgccgagctactcgctgttttagtcgctgaaaatgagagttatacgtacgtggataagcttggatatgcaccatctaaggatttagctctttattatctgagggaggctttgagggactttatctccctcaaaaataagcctcaatctcaatggagtagtccgaaagcctttgaggaggccgggaagataaaaatggagctcgtggagagggagatagagagcatagagaggatatctagtatgaaggagctgagggaagctgtctcccttatcgctgcgaaggctctctctatagcctctagactcaagggttag

SEQ ID NO: 41 - protein, 108 aa, Candidatus Korarchaeum
MENIAELLAVLVAENESYTYVDKLGYAPSKDLALYYLREALRDFISLKNKPQSQWSSPKAFEEAGKIKMELVEREIESIERISSMKELREAVSLIAAKALSIASRLKG

SEQ ID NO: 42 - DNA, 972 bp, Candidatus Korarchaeum
atggcggatccattcgtttcagttaggggaagggttttgatcaatgttgaggccctgaatatgacggaaagtgttgggaattatgtgaaacataggagggtccctgtaataatgccggagacttatgcaacttacttcgtcccctccgtgagcggggagtcgatagctcatggttaccagcaagtattagctgaggaagcttcaggaaagggattacctgtgtgtaagttatgcagcaaggggtacttcctgaagagcactaacgatgccgtcttcaaggagtccttcggagtaaatccacctgaaggagagagtgaattcgaaagagctgtgataaaggggtgcgtcgtagaagatgtgggaggtttcctctatgctccagctaggggagggaagaacgtcaagaggacctcgaatttcttcgtcggttatatgataccgactagagagtcgctcgagagcgctgtgatagaacctcaactccacacgagatatgcattgggcactcccttcgttgaggagggggcgagggctggtggtcagatgatttactacatagagctctcctccgcagcgtatacgttcagcttcgatctcgatactaagtacttagggaaagcgactttctccatggagaatgtcggtcaaactgtcgtagatggagatgagaggaagaagaggataggagctgccttagacgctctatcgaaattcatgatagagatgatgtttggggcgaagaagacgaggttccttcctgtgattgaatgggaatcagttgtcatagcagttagcgatgatgtatggactgtcccgagcccgttctccaagaattatatagagagagcggaggagaaggtgaagaaggtcagctacaatacgaagctattcaagtacacgggaggggctgggttcgaggaagtcgtaattgaggcaatgaatgaggcgaagaggagggctggagtgagttga

SEQ ID NO: 43 - protein, 323 aa, Candidatus Korarchaeum
MADPFVSVRGRVLINVEALNMTESVGNYVKHRRVPVIMPETYATYFVPSVSGESIAHGYQQVLAEEASGKGLPVCKLCSKGYFLKSTNDAVFKESFGVNPPEGESEFERAVIKGCVVEDVGGFLYAPARGGKNVKRTSNFFVGYMIPTRESLESAVIEPQLHTRYALGTPFVEEGARAGGQMIYYIELSSAAYTFSFDLDTKYLGKATFSMENVGQTVVDGDERKKRIGAALDALSKFMIEMMFGAKKTRFLPVIEWESVVIAVSDDVWTVPSPFSKNYIERAEEKVKKVSYNTKLFKYTGGAGFEEVVIEAMNEAKRRAGVS

SEQ ID NO: 44 - DNA, 837 bp, Candidatus Korarchaeum
ttgatgaacacttcggcattcatagtagatgtagaattcgtttggggatttcagacgaggatagctggcctatctaagacatctccctccttttactaccctccccctactacatttttgggagctctgggcgaatctatcgccaggaagctgggagtgggggaatccgctgggagagggatcatagcatctttgggcagggaactcttagctctcggaattagaccattgaactgcgtccctctcaaatatgaggacataaataagataatagctgtgaagttgacatcaggtatcccttatccagatccgaggaatatggcctcttcttacgattctccggccagagggaagacagttatggtcagtttagatgagaattcccctattttaaggttcctcctcgtattcaggaaagataagatcgatcttagagggaaagccttggagctggatgaggattatttctggaggatacacaggttgggatcgaaagagagcagggtttccgtgatagatgtgaggaggaaggatgggataaatgcggaggaggggaaaataatttctaagtacagttttccagtgatgaaaggagtgcagccattggaggagcttcagaggaagtggctttatgaagcttacattaacccgagggacatagaatattctgagagagtcaatcccgttttaacatacatggagagtagatcgctaataccgttcagaattcccatattagtggtgaggactgaggaacctgagttcatcgtcgaggtgcgagagccctctgcatattacagagttaatggggaagtcgtgatagggtggaggggatga

SEQ ID NO: 45 - protein, 278 aa, Candidatus Korarchaeum
MMNTSAFIVDVEFVWGFQTRIAGLSKTSPSFYYPPPTTFLGALGESIARKLGVGESAGRGIIASLGRELLALGIRPLNCVPLKYEDINKIIAVKLTSGIPYPDPRNMASSYDSPARGKTVMVSLDENSPILRFLLVFRKDKIDLRGKALELDEDYFWRIHRLGSKESRVSVIDVRRKDGINAEEGKIISKYSFPVMKGVQPLEELQRKWLYEAYINPRDIEYSERVNPVLTYMESRSLIPFRIPILVVRTEEPEFIVEVREPSAYYRVNGEVVIGWRG

SEQ ID NO: 46 - DNA, 1182 bp, Candidatus Korarchaeum
atgagattagagttaggtttacccccagattccacgttcctcagcggggtgatttacgaggggatcctctacattctagctaatgtaaaggaaggatcatttaacctcgattgggcagaattgccagtggatttcctctgcagggcttacgagagtattgatgaggatagggtggagagcttatcgatagtgctaacgggaaacgataaaatagataagtttttggagagcttagggataaatgagagacctcctaagaagacttacagagaattattgaagttactgaagagacaatgcagaagcataccgattaatagggataagatagtagtgagagctgagattaagggaaagaatatgtccttagatgcggagaaaagcatattagcagcacctcaactattcaaagtcgatagatatactgggctctcgacagtggagatgaagactacatcggagcagttgggcctcagggcatcccctgagatcatcttgataggtctcctaggggtatattcatcgcacataacgactgtcagatcgcaggatagcacgcatcactacttcctcttcctctcaccagacgaggtcactagtgtgcttgcctccggggatccattcaagttaaccaacatctactcagttaaagaatctttgagggagttgctctcggaaattctcccaagctcggctgtcagtgaagttatggtccttgaggtgatgctgagcactaaaataagatctgaactcatgaaaatgaatctggataaagtggacttcaatgtttttaagatagctcctgaggggatgacttacaagatatatgagacagttcccatttccgtatatagagaacccatgttctacgccgctctttctaagcggggagctaaggtagacaagttgtgcgaggaacttcatgaagctctctcgcctggtaaggcaataatgagagcgttggcatctttcaattcgaggaataaatacagtgaggctgataccatcctcagaggagttctagatctctataaattcgtgtcaactgctgatactcaaggcctcttcggattcctcagatcgctggaggaatcttgcgtaattctaagggatgataaaagagcacgttccaggatagaggagtatgccagcatacagagaaagatctcttacgccctctaa

SEQ ID NO: 47 - protein, 393 aa, Candidatus Korarchaeum
MRLELGLPPDSTFLSGVIYEGILYILANVKEGSFNLDWAELPVDFLCRAYESIDEDRVESLSIVLTGNDKIDKFLESLGINERPPKKTYRELLKLLKRQCRSIPINRDKIVVRAEIKGKNMSLDAEKSILAAPQLFKVDRYTGLSTVEMKTTSEQLGLRASPEIILIGLLGVYSSHITTVRSQDSTHHYFLFLSPDEVTSVLASGDPFKLTNIYSVKESLRELLSEILPSSAVSEVMVLEVMLSTKIRSELMKMNLDKVDFNVFKIAPEGMTYKIYETVPISVYREPMFYAALSKRGAKVDKLCEELHEALSPGKAIMRALASFNSRNKYSEADTILRGVLDLYKFVSTADTQGLFGFLRSLEESCVILRDDKRARSRIEEYASIQRKISYAL

SEQ ID NO: 48 - DNA, 459 bp, Candidatus Korarchaeum
atgtatcaagaagaattttgtgaaagatattgtaaatattttccatgccgtgagtgtcctcatagagggacggaggaatgtagttactgcgatccctcttgtggggtagggagtggaagcatagtttgtctcttaagaaaaccacctttctctagagatgtatgctataactcccagcagtgttatgagaagtttcttaagggcctaattaagatgtacggcggtgaacctccctggaagcatgacttagagagattattgagcgagttacctgaagatgcgagatataggatcttgaaggagggcgatcttattagatgcatccacgatctgaataattataatacagcgagatatcattatgagttatctgatgaagaggtctccacatgcttggaatgcgctgaaaagatcctatctctcctcgaaggaattgaggagtttgaggggatcgcatga

SEQ ID NO: 49 - protein, 152 aa, Candidatus Korarchaeum
MYQEEFCERYCKYFPCRECPHRGTEECSYCDPSCGVGSGSIVCLLRKPPFSRDVCYNSQQCYEKFLKGLIKMYGGEPPWKHDLERLLSELPEDARYRILKEGDLIRCIHDLNNYNTARYHYELSDEEVSTCLECAEKILSLLEGIEEFEGIA

SEQ ID NO: 50 - DNA, 1695 bp, Candidatus Korarchaeum
atgacctttctatcccactacttggaacgcgtcctttcgacattaccgggaagggaggataggcctttcctcaatttcgctataaagaaagctgaggatagcagggtctcgatcatagaagcgcctacaggctatggaaaatccgcaatctcacaggcaatcgcgctcagatctttggaagaggggctaaaatgcgtaatcgcattccccttgaggactctcctcgaggatcagttagctaagttcagagggacattgcgtaagctggatttagatgagagatatgtaggagctagatatatgcattatccggaatctagatatctgataagacctattactctaactacagctgatactctctccctaactctcttcggtatagcccctgaggacttagagacggccttcaagcactacgatgggactctgactgggagcatgggtcattatctcttctccagagcgatggtgcttctatcggatttagtactcgatgaagtccaccttttatcagataccactaaatcactgaacttcctaattgcccttatctggatagtgaccttccatggagggagagctaccttcatgtcggcgacgattcctaaggctctggagaatctcctcaggagggaatgtgagggcatcggactcaagattattagattctcagaagatcctgataatgcgttcctagaggagaggaggaagaagaggtatgaggtgaatttggagaaactcgggagcgataagttcgagaggatctcggagtggataaagatcggtatgagggacgggtttagaagagctatcgtcgtcttcaatacagtgaatgaagctatcgagttctatagattcgtgagggagaacttggacctgcggaaggataggatactcctcctccactccaggttctcggggaaggatagagaggccaagatgagaaggatcgaggagttgaggaatgaggagtacttgctagtctccacccaagttatagaggcgggtgtcgatatatcctcagatctcttcgtatcggatctagctcctgcttcctcacttatccagaggctggggaggttcctgaggtacgggggtgagcaggaggggagggccttcctctggtatgaggagggggacggggagaagtacaaaggcgtatacgatatagatctcttcgagagaactctctatttcttagaggggaatgatgtgagatttcacgacccggaaagttatcaagctcttttggatagtgtttatgatgagagctccttcaacttgaaaccgagagatgtgaatgaattaatttccatagagagtattttagagagctcctatcgggcgatcgagaaatttatagagcttgaggggagtttcgtgagagatagcacattagtccccgtagtccctggctccttatggcgtgaagatatgcctataagcgaattaagggagcttctagtccctatgaatttatcgacagtatatcagattaaaccgaaggagatgctcattatagaggagggaaaagtaataaagaagcccactgagactctctggaacaggaaaagagagcatgtattgaaatacactctatcatctaaattcgttgcgttctcagtggaaggggattacgatgaggaactgggtatggtggtgaggtatggggagggtcatcagttactataa

SEQ ID NO: 51 - protein, 564 aa, Candidatus Korarchaeum
MTFLSHYLERVLSTLPGREDRPFLNFAIKKAEDSRVSIIEAPTGYGKSAISQAIALRSLEEGLKCVIAFPLRTLLEDQLAKFRGTLRKLDLDERYVGARYMHYPESRYLIRPITLTTADTLSLTLFGIAPEDLETAFKHYDGTLTGSMGHYLFSRAMVLLSDLVLDEVHLLSDTTKSLNFLIALIWIVTFHGGRATFMSATIPKALENLLRRECEGIGLKIIRFSEDPDNAFLEERRKKRYEVNLEKLGSDKFERISEWIKIGMRDGFRRAIVVFNTVNEAIEFYRFVRENLDLRKDRILLLHSRFSGKDREAKMRRIEELRNEEYLLVSTQVIEAGVDISSDLFVSDLAPASSLIQRLGRFLRYGGEQEGRAFLWYEEGDGEKYKGVYDIDLFERTLYFLEGNDVRFHDPESYQALLDSVYDESSFNLKPRDVNELISIESILESSYRAIEKFIELEGSFVRDSTLVPVVPGSLWREDMPISELRELLVPMNLSTVYQIKPKEMLIIEEGKVIKKPTETLWNRKREHVLKYTLSSKFVAFSVEGDYDEELGMVVRYGEGHQLL

SEQ ID NO: 52 - DNA, 762 bp, Candidatus Korarchaeum
atggggagggtcatcagttactataagccccctgtgacagagtatctatcggagcatataaacagctgccttaacctcttggagaagcttgagagctcaaggatagggagagtgggcctctctctcgatagaaacttcgtcgatgaagttagattgtctgtagtgttccacgattttggtaaggccttatatcagagtaaaatctcccctcgaaaaagctcggtgagcttcgcagggcatgaaatcttctcaacatatttcttatttaagttcagaaaatcgatcataaagggagctgattttaatgaatacattaagttaaaaccggctctattcgctgtgacgtttcatcaccatcctatggatattggtaggagattggagagagtacaacagatcaaactgaatactagctccctggaggatcttcaagccgaactgtcgttcttgagagatgatgccctatctaaggaggagagagatttactcgattctgttgtaagtgagctcaagggcaaaattgagaatggttcgatcagaatagatgacgtaaagcggatattccgtgaggagatctgtaaaggtttttatgaaaaatatacctcaggaaaagaagaagatgtaatcttgaagaagttatcatatctaactttagtatcactcgttagcgttgattatatatcagcgagtgagaggagaggtgaaggtacgaaattcggtgatgttatagatgaattttacaaattatatttagatatatag

SEQ ID NO: 53 - protein, 253 aa, Candidatus Korarchaeum
MGRVISYYKPPVTEYLSEHINSCLNLLEKLESSRIGRVGLSLDRNFVDEVRLSVVFHDFGKALYQSKISPRKSSVSFAGHEIFSTYFLFKFRKSIIKGADFNEYIKLKPALFAVTFHHHPMDIGRRLERVQQIKLNTSSLEDLQAELSFLRDDALSKEERDLLDSVVSELKGKIENGSIRIDDVKRIFREEICKGFYEKYTSGKEEDVILKKLSYLTLVSLVSVDYISASERRGEGTKFGDVIDEFYKLYLDI

SEQ ID NO: 54 - DNA, 315 bp, Candidatus Korarchaeum
atgaagaagcgctcagatgagactgaatgttctaaagagatacttgagataattgaggagaatatggaagatccggagtgcgggccgttaatggagatagtagatcatatgagggaggaggaggctaaagttaggggcgggcttaaagtggaaaggcttctcgcacgtagaatcgatcaactcgctaacgggaattttaaacacaaatattgcccatctgattgggtgaagaaagggaagaaattcgattacttcctattgatagaagttaaggggaaaaggatatctgcgttcatgtggagtgtaaacgtataa

SEQ ID NO: 55 - protein, 104 aa, Candidatus Korarchaeum
MKKRSDETECSKEILEIIEENMEDPECGPLMEIVDHMREEEAKVRGGLKVERLLARRIDQLANGNFKHKYCPSDWVKKGKKFDYFLLIEVKGKRISAFMWSVNV

SEQ ID NO: 56 - DNA, 1128 bp, Candidatus Korarchaeum
atgataagtgagataagagtgaggaacctcatcaggataatcgaggccgatatcgaaatagggaatgtgacgctactatacgggccgaatagcgagggaaaatcgagtatattgagagcgatagatctcctgctatgcactattctcgggcccattaatgattatcctgatctctcggattacgctagaatagataacccgaaactcagcttggaggcacaattagatgaacctttctcagataaggtttccttagaagtagattactcctacctcctcccaatttctcctttagtcgagaaggagtctatattgcccagtagacttgaactgaagagcgagagatataaatttgtccacagatacgatatggagagagggagccaagtcctctccggggggctcgtttttcgagtgaacaaactccctccccccaaagggacctacctactagagagtgactacatctcctcgctcagaattgcagggatcgatctaggggatcttccggagctttctagagattttgagaggctcaggagtcgctttgagaaaccatatctatatctacgcagaccctcatatgacgatattctgaagaacattgaggatggcgtgaattatctctactcgctcgggagagctagagtgggtgaattcatcgaggatctgaatagtgtgacggcagattccgtttcagtagaagatataatccccgggaaaaggatatatgtatgccaagataactcctgtctccctctaacttccatgagcgatggtttccttcaagtactcaatatattgatctccgcctacaggatcgagaacttcttgagatatgctgagaagttcgggatcgaattgaaaggagttctactcacagaagttttcgatgcgggagtccacgtggattggctcctaaacctcttggacttaatggaggagaaagagaatatcagattcgtagctgaattgcacacggggctcctcctctctagagctataaagcgcgggtttccggcttactacgtccacgatgggagagcggagagactgaccgaggagaacataacgagtccggagctcttcaggagggagagagaagcttatgaagaagcgctcagatga

SEQ ID NO: 57 - protein, 375 aa, Candidatus Korarchaeum
MISEIRVRNLIRIIEADIEIGNVTLLYGPNSEGKSSILRAIDLLLCTILGPINDYPDLSDYARIDNPKLSLEAQLDEPFSDKVSLEVDYSYLLPISPLVEKESILPSRLELKSERYKFVHRYDMERGSQVLSGGLVFRVNKLPPPKGTYLLESDYISSLRIAGIDLGDLPELSRDFERLRSRFEKPYLYLRRPSYDDILKNIEDGVNYLYSLGRARVGEFIEDLNSVTADSVSVEDIIPGKRIYVCQDNSCLPLTSMSDGFLQVLNILISAYRIENFLRYAEKFGIELKGVLLTEVFDAGVHVDWLLNLLDLMEEKENIRFVAELHTGLLLSRAIKRGFPAYYVHDGRAERLTEENITSPELFRREREAYEEALR

SEQ ID NO: 58 - DNA, 753 bp, Candidatus Korarchaeum
atgagactgatcgaggagatcgggaagatccccctgaatccctcctcgatgaataccctctcctggatgaggatcaggggcctgaaatacctgagggataaggcggagaggggtggggaatccgaggagaggaggagaattctagaggacctattcacagcatattcacccgataatttgaatgaggtcttcaaaaaagcctcaaatctcttagatatgcagaaatctgctctcaaatcttgtggttatgacgtattcgatttcctagccgtgacgaggtctagattgatagttgggatggcgagcgagatcttcgggaagcagatattcgaagtgggcctatcctgggatcctctcctaaatctcccctatataccaggatcttcattgaaaggggccttcagatcctatctggagtcagagaggccggatcttgtcccattgctcggatctaaatcggaatcttcttcaataatcttcctcgattcctacccagtcagctccaagagcaatttattagtgcccgaggtcaccacccccatatacggagctaagggagttagggaagtgaaagctgagccgaagccagtgatatatcccgttataaataaggacgtgacattcaggatgattattgggttgagggggaagggtaggagattaggtgacttcttaggacaattcatgatggaggtcctcaggagagggatcggagcgaagaccctagtaggttacgggctcatggagctgtag

SEQ ID NO: 59 - protein, 250 aa, Candidatus Korarchaeum
MRLIEEIGKIPLNPSSMNTLSWMRIRGLKYLRDKAERGGESEERRRILEDLFTAYSPDNLNEVFKKASNLLDMQKSALKSCGYDVFDFLAVTRSRLIVGMASEIFGKQIFEVGLSWDPLLNLPYIPGSSLKGAFRSYLESERPDLVPLLGSKSESSSIIFLDSYPVSSKSNLLVPEVTTPIYGAKGVREVKAEPKPVIYPVINKDVTFRMIIGLRGKGRRLGDFLGQFMMEVLRRGIGAKTLVGYGLMEL

SEQ ID NO: 60 - DNA, 1200 bp, Candidatus Korarchaeum
atgagtatattgctcaagctcaatggggagagcaggctttatctgggtggttacgatacccagttccacgaggaagatcctttcaggactcaatccctcaaggggctctggaggtattggctgagagcttacatagccggagctatgtacgacgcgggcctcctggagtgcaaggaggagggggatctcgtctgcgggatcgatcccgaatctctcaagaaaatagtggagaagacaggggatcttctgggaagccagggatcagcttcgaaattcaggatagttatcaacagagctaaagctgatcgtaaggaggatgaattcgctgcacagaggataaggctcctctccatggggaagagagggaagattagttatggagataaggcatacgctgagataataattgagaagtctccacacgtgaaaaggatcgatgaaaatgagataaaagtagtaataggatcccttctcacggctctctccctcaacgggctggggaagggagggaggaggggcctcgggactttctctgtggaagtagagggcttcaatggggatttcttggtgaacgggaagctggatcacagcaagctcagggagttgataagggagactatggaatccgtgaggtcttacttggatctcgataggggaaaaccgagtgagatacctccgatagactgcatatcggaagctaaaatcgacctctccgggattgtacctggtgtgaggctcatcaacttgagggaaactccggtcttcatgatagtgagagccaagccgagggaagataagagtatagataatatggttatagagcttcaagatttcttctacaggcccgctaggttgaggagaatgaaatacaggataagcagcgctgatgagagcagggacgacataactagggagaggttggcatggttcctcggcctcccgagaatgcagaagatgactggatatatttacgatgggaggagggcgagcgccgtccatctagcggtccataaggagggagccctcttcacattcttcctctcgggtgactggccgaccgagattgtttggatagggaggagaaggaagaatctgaagatagatcgcttagaggtgaagaaagcttacatcacgtcggtctcgagccttctggagtatctcgataggatcggatatgagagcgaggtgatctacttatga

SEQ ID NO: 61 - protein, 399 aa, Candidatus Korarchaeum
MSILLKLNGESRLYLGGYDTQFHEEDPFRTQSLKGLWRYWLRAYIAGAMYDAGLLECKEEGDLVCGIDPESLKKIVEKTGDLLGSQGSASKFRIVINRAKADRKEDEFAAQRIRLLSMGKRGKISYGDKAYAEIIIEKSPHVKRIDENEIKVVIGSLLTALSLNGLGKGGRRGLGTFSVEVEGFNGDFLVNGKLDHSKLRELIRETMESVRSYLDLDRGKPSEIPPIDCISEAKIDLSGIVPGVRLINLRETPVFMIVRAKPREDKSIDNMVIELQDFFYRPARLRRMKYRISSADESRDDITRERLAWFLGLPRMQKMTGYIYDGRRASAVHLAVHKEGALFTFFLSGDWPTEIVWIGRRRKNLKIDRLEVKKAYITSVSSLLEYLDRIGYESEVIYL

SEQ ID NO: 62 - DNA, 936 bp, Candidatus Korarchaeum
atgtacagagctgctttcaggtctttagagccttacctcttcaggggtcctggggagttcgatccgagcgctaggggcgtttactcatgggctagctcgctcctagccccgagtccatcgactacagccggagccctggcgactgtacgcgagcatattgatacgggatccatgagctgggatgaggcctactcgagggtcctgggagtcaggatgagggggccctacctgaggaagggatccgtgatatacgtggaggatagagtggatgggaagttcattaggctcgaggatgtcgaggagtactgtcgcctcaagagggatctcagcaaggggtcggaggagaagttgagggaaattttaagcaggggattctccccgaaggagctaacggtcacgggaatagggctcaaaactaggagggagatgttgaaggtagctgatgaggatagggggctcatttacacagctactttcatagattacctctccgacatggagctagacactacgatagagttcgatttagtatcgggggagatcgagacggggaggtacgtggtgaggctgggaggggagggaagggtatccttgctcgagatatctgaagccgataattacatctgcgatataccggagagagcacacctactctacgtgctatcccccatcctttatgagacggggagggatttcattgagatcttgagggaggagataggggaagctgaagtttacggtaagatagatctcttaggaacgggatacagtgaaatcaggaagaggaggaagcccatttatcaagccctcctcccgggaagtgtgatattcttggagagaggtgtggagggacgcgaggtatatgagaaggggataggcgtggggagggagctgggcttcggctccgtcatccctgtcgggggtgatgggagatga

SEQ ID NO: 63 - protein, 311 aa, Candidatus Korarchaeum
MYRAAFRSLEPYLFRGPGEFDPSARGVYSWASSLLAPSPSTTAGALATVREHIDTGSMSWDEAYSRVLGVRMRGPYLRKGSVIYVEDRVDGKFIRLEDVEEYCRLKRDLSKGSEEKLREILSRGFSPKELTVTGIGLKTRREMLKVADEDRGLIYTATFIDYLSDMELDTTIEFDLVSGEIETGRYVVRLGGEGRVSLLEISEADNYICDIPERAHLLYVLSPILYETGRDFIEILREEIGEAEVYGKIDLLGTGYSEIRKRRKPIYQALLPGSVIFLERGVEGREVYEKGIGVGRELGFGSVIPVGGDGR

SEQ ID NO: 64 - DNA, 2802 bp, Candidatus Korarchaeum
atggacttacgcgagctaatcctcctgaagacagcggcattattccatgaccctcctgacaaagcatggtgcttggtgaggggagagaagcatgagaaatgggctgaggagctcgctcatatagctttagacgggactcccctgagtgaagcgggggagatgctatccgatgaaagggtaagggaggcggatagactcgctgcctcggtcgatagggtcctgctcggggagctcataggggataagagaggcgccttcccggagaagtccataaaattgaagaatccgataaacccgaggatagagcactcaatacaagtcgatttagggaaggataaagtagaggaagtcatgagagaattaaatggtgtgctcaagaagactgaaaatgtagaagaagcttacctcgctctcttcggcctatatgagctcatatggattgctaagggcctcccatcaggcccagcagataccaggatacctactcacacggttttcgatcacctctacgcgacagctaccgctctgaactggacatatgagggagggggccttctcctccacatagatatagctggcgtccaggacttcatagcacaatcgaggagattgagggatctatgggcatcaagttacatcatttcagccctcctctggagcacggtgctaaatctcatcagatatgggcctgatgtcgtgctgacaccatcatgcaggttcaacccattcttctactgtgatctcactaacagagttcaagcgataggagattacttgaaaatcatcaagatagaaggatttgaggagatcttatgcgagagattttcctttcctaggttcgcagtaatccccggatctatgactttagtcctgccttcattcatctcggatgccgaggtgctcgttgaggagagcttcaggaggaaatggaaggagttctgtgagggtataatggagctcgatgtacccctgtccagggatctagagagggaaatgcgttatgggttcatggaagtgcctcctttctcaatgagaatatcctcagttcgcgtggatacttcgaagggcggagataatgtctatgcgaaagcattcgaatccctgatgaatgagaataggaagaaaaagctcctaaaggtgaatcctgcttgcatgctccctctaacagagatcacgagggagatattcgatggtaagggctccctagctgatagtaagaggggcttcgattactgtacgatgtgcgggaagctccctgctatagtacggtgggatggaagggcctccgatgagttcttggaggagggagagaggctctgcccgtattgcttgatgaagaggatcttctcccgcaggccaggtcctgtgctccgcaggatcctagggtacgggggagatgtgaagatatcttacccatccctcgccgatatagctacttttgagttcaaggatggcttcttaagagatcttccgtctttagataagctttggaaggatgggaagatcagggagttgatgggaagagttctagagtcccagtatgaggagagagtcctcgcctggaaataccaattgaggaagttcgaggagataggggaatctagtatagatccggatctgaagagggggctcctaggctttctattggcggagtccgaagtagctatacttgggaaggagaagaggaagctctggtctgaattgagaaggtatttggaggaaaaaggcatcgttatacctcctatagggatgtattacgcgttaataagggcagatggggatgacatggggagtatcctaagtggagaagtaggagtaatcgggatcgatgtgaaggattacatagtgagctcattcgaggggaaatccagggaggtagtactgaggatcatggattctgattatgagaagttgaaagatatagcgaaggaggagaatctcaatgaggagaacttacgtaagaccaaggaattcttaaatgaaattatatcgagcaggaagattccagtgagtctatcttatcacgtctcgatctctagggccctcataatatctgctctcagggatataaagcaaatcgaggacaacaatggcatcgtcatatacgcgggaggtgacgatctactctcaatagctcccgtgagttcagcgatcaggataatcgatgggagcaggcgtggctacagtggtctcgatggatccggtcggttccacaagctaggcaattacttgataccatctatgggagacgctgggaggagttactccctctacatcacgcattacaggtatccgctttacgccgtggtgagcgattcctcacttaagctagaggtagctaagggctccgtttgggtagatgggagggagaggaagaaggattctctgatcataacttattcagctagaggatcctcggagagctctatactccctctctccctgagggatcccgggctatctccggtggacctccgattcctggacgatctcatcgggaagatcaggtccggggatatctcagttagcttactctatgaagcttcccgaggtaacttcatggagaccgctgagagggcttggagcatggggaagatggagatcttcgataaggtcatcgagtacatgatagggagacacatacagagaggagagaggagggaagatatcctgagggagataatggagtatataaagagatatgagggagtcaggaggcgtgatcgcgatggagaggaacccttcttcctgaatctattcaagtcgtgcaggctcctctacagcggtttgaggggtgattga

SEQ ID NO: 65 - protein, 933 aa, Candidatus Korarchaeum
MDLRELILLKTAALFHDPPDKAWCLVRGEKHEKWAEELAHIALDGTPLSEAGEMLSDERVREADRLAASVDRVLLGELIGDKRGAFPEKSIKLKNPINPRIEHSIQVDLGKDKVEEVMRELNGVLKKTENVEEAYLALFGLYELIWIAKGLPSGPADTRIPTHTVFDHLYATATALNWTYEGGGLLLHIDIAGVQDFIAQSRRLRDLWASSYIISALLWSTVLNLIRYGPDVVLTPSCRFNPFFYCDLTNRVQAIGDYLKIIKIEGFEEILCERFSFPRFAVIPGSMTLVLPSFISDAEVLVEESFRRKWKEFCEGIMELDVPLSRDLEREMRYGFMEVPPFSMRISSVRVDTSKGGDNVYAKAFESLMNENRKKKLLKVNPACMLPLTEITREIFDGKGSLADSKRGFDYCTMCGKLPAIVRWDGRASDEFLEEGERLCPYCLMKRIFSRRPGPVLRRILGYGGDVKISYPSLADIATFEFKDGFLRDLPSLDKLWKDGKIRELMGRVLESQYEERVLAWKYQLRKFEEIGESSIDPDLKRGLLGFLLAESEVAILGKEKRKLWSELRRYLEEKGIVIPPIGMYYALIRADGDDMGSILSGEVGVIGIDVKDYIVSSFEGKSREVVLRIMDSDYEKLKDIAKEENLNEENLRKTKEFLNEIISSRKIPVSLSYHVSISRALIISALRDIKQIEDNNGIVIYAGGDDLLSIAPVSSAIRIIDGSRRGYSGLDGSGRFHKLGNYLIPSMGDAGRSYSLYITHYRYPLYAVVSDSSLKLEVAKGSVWVDGRERKKDSLIITYSARGSSESSILPLSLRDPGLSPVDLRFLDDLIGKIRSGDISVSLLYEASRGNFMETAERAWSMGKMEIFDKVIEYMIGRHIQRGERREDILREIMEYIKRYEGVRRRDRDGEEPFFLNLFKSCRLLYSGLRGD

SEQ ID NO: 66 - DNA, 474 bp, Candidatus Korarchaeum
atgggagagaaggaggcgatcagccctcagggtagagctttgagggattttgagctgatatataagctttacctggatgggaacatagtagatttcggtaagtccttcagatccagagccagagagaccccttctttcctctacgaggtcgggttgatatccggcctgagtttcatatacgctaagacagatgacgctaccgagaggacttacgctattctcttaaattgcttgaaaggagatactaaagatctgaaaagacttaactcaaaggaagggggttatgctgcctacctccacctcctcctcctcgagatcagcaggctcgtaccggataagaacttggatctcagagaccccctctcatgtattaaggcacttgaaggattggataggcccctagttccactcctaataccatatctcctcgagataaagagactggctgaagctacgctaccatcggagggttaa

SEQ ID NO: 67 - protein, 157 aa, Candidatus Korarchaeum
MGEKEAISPQGRALRDFELIYKLYLDGNIVDFGKSFRSRARETPSFLYEVGLISGLSFIYAKTDDATERTYAILLNCLKGDTKDLKRLNSKEGGYAAYLHLLLLEISRLVPDKNLDLRDPLSCIKALEGLDRPLVPLLIPYLLEIKRLAEATLPSEG

SEQ ID NO: 68 - DNA, 918 bp, Candidatus Korarchaeum
ttgtcctttgaaccctacaaatttgcaaaagttgtcatcataaaatgcctgagcgacattcaccctggaactgggagaggaggggagattgtcgatctagctgtccagagagatagtgtcggttttccagtgatatacggatctagcataaagggatccataaagacggccctgtatcacagggataagaacttgatggctcttctgggaccagagcctgatgaggaggagaaatatctatctccaatagcgataacgacatcttacctcctctcattccccgttaggagtctgaaaggtatctacacgaatatcacatcccccttcctcttgaggaggttctccagttacttagagatggcctccgtgcttaatgagaagtacgttgagatctcgaagagagtaaagagcatagccagtatatcagggaaattcccagctactaaaggcttcattgaaaagcatgtagtagatgggcttggaaaggccttcctctgcgaggagataggcatcgatagggaacttatagaggagagagatgatatggattatctcaggaaactaatgggcctcgacgatagtgagagcttgatatctttagatgacgatagggctaaggaactcatcgaaagatccctcctaaggatcacgaggataagagtgaatagggagacgaagacggtggctggaggaggcctatggactgaggaggccatcccgactggggccctattctcaacagtattcctcggatatagctacgagtatatgagggacgtcctgaagaaagcagtggagggggagcgagaggatctgaaggatcccatagatgctttactgaaggaggtcaagtacttgataataggaggggatgagagcgtcggaagggggatcgtgatgctcagggaggtggagtga

SEQ ID NO: 69 - protein, 305 aa, Candidatus Korarchaeum
MSFEPYKFAKVVIIKCLSDIHPGTGRGGEIVDLAVQRDSVGFPVIYGSSIKGSIKTALYHRDKNLMALLGPEPDEEEKYLSPIAITTSYLLSFPVRSLKGIYTNITSPFLLRRFSSYLEMASVLNEKYVEISKRVKSIASISGKFPATKGFIEKHVVDGLGKAFLCEEIGIDRELIEERDDMDYLRKLMGLDDSESLISLDDDRAKELIERSLLRITRIRVNRETKTVAGGGLWTEEAIPTGALFSTVFLGYSYEYMRDVLKKAVEGEREDLKDPIDALLKEVKYLIIGGDESVGRGIVMLREVE

SEQ ID NO: 70 - DNA, 738 bp, Candidatus Korarchaeum
atgcaagcagctatagttgcgactatgggcctctcccctcctgtcgtgaccgagttcctccagtacttaatatcggaaggggaggatgttaggaggatagtactgctctccactgaagagagagacgttctggctggatccaagctcgttgaagtagctgtgaaatctaaatatcccaggataagggtggatactgaggtcttcccgtaccaggatgtggataatgaggagagggccttcgatttcctcatgagagtagctaaattgatcccggatctgagaaaataccgcttatacctcctcatatccggaggtaggaaggtcatgagcttggagctggcgatgatgagcctcttcttcccattgagcggcgtgtatcatgtagtagccagggacgtgagagtggctaatgtgctactggagagcctgagggagaagataaaggagctgtatgaagctagcgatcccttatccttctacagatctgtagaggagttcgaagaactcatgtggccccccagaacggaatacagtgtcataaggcttccatctatcccatatcccgctgaggtcctggaggaagctgtgaaagtactgaggggggctaagagagatgaggtgaggttcaacatggcagttttaatggagcagctcggcctcgtacaagtgagcgggggaaggacgatacccacggagtacgggaggaagattctcgagttcctgagcgagataatgtga

SEQ ID NO: 71 - protein, 245 aa, Candidatus Korarchaeum
MQAAIVATMGLSPPVVTEFLQYLISEGEDVRRIVLLSTEERDVLAGSKLVEVAVKSKYPRIRVDTEVFPYQDVDNEERAFDFLMRVAKLIPDLRKYRLYLLISGGRKVMSLELAMMSLFFPLSGVYHVVARDVRVANVLLESLREKIKELYEASDPLSFYRSVEEFEELMWPPRTEYSVIRLPSIPYPAEVLEEAVKVLRGAKRDEVRFNMAVLMEQLGLVQVSGGRTIPTEYGRKILEFLSEIM

SEQ ID NO: 72 - DNA, 1401 bp, Candidatus Korarchaeum
atgagtgagcggatttgcatcgctacatgggggaacccccaggagtggaagttcgccgagtattactcagaggatcaacctcagaggagagtacgcgccttctccaccctcaatatcctccatgagatcgagcaaccttcgaagacgattataatagccctcgacacattggcagacccggataagctggaggagtgcggatccgattatagctgcatcgaggcgaatgtcagggagaagattggaaaatacttgtgcgggattgaggcagagattgtagtgcttcctggagtcttctcgaagagggaatctggaagacaaataatcttcagatcagatccccaaaaggaatttttacctctcctaatttatgagctttacgacaggctgctgaatgtggacggcgaattggaggtggtgctcgatataagccacggtataaatttcatgccgactctcgcctatagagcggttaccgaggtagcagcagctttagcggttgcgagagcagaacaggtgaaactgagggtttatcaagctgatccatacccatcgttacctcgtgagatcggaaatagacttgctagaagcgatgatctgtgcaagcctgcatctgaggatgaaccgccgagtttacgttacaataagatcgctgaggctactttcaagctctgggatctatcccgttatgtggctcattatagtgagaggaggctactgacagctccaaaggattatgactttggcaactcagacgagcttttggagaaagccttactacttcttggtgcttataggctgggtgccctcctacaattgggtctactagctaaaactactcacatagaggatttagagcgggttatgaggaaagcagtagagttctggagaaggaagaggagagtagtcagagagatcaatggtttaaagttggagagtgataagaagttcctgaccggcttttacttactattacatgggcatgccgtgctcagaggagcaaagaagctactgtctgagagcgaatccgccagcctagatgaagctatcgttacttttaaggagatcaacgaactaaagaaactcctagaaggctccaaggttgtgacaatactcgtggatagggagatttccaaacttgataataaggttcgaaaatcaggtaatataattaacgattggacattgtatacggatatactggagaagccagaggagaaatcagatggagagccccagcgggagagggaagatatggagatatttaagaggaacttcatagctcatgcaggattccacgatgaagttgtcgaacttaggatgaggaatgatatagagcttagggtgcgcccaggtgagtgggatagagtgaagggagctcttaaggaagcggtggcataa

SEQ ID NO: 73 - protein, 466 aa, Candidatus Korarchaeum
MSERICIATWGNPQEWKFAEYYSEDQPQRRVRAFSTLNILHEIEQPSKTIIIALDTLADPDKLEECGSDYSCIEANVREKIGKYLCGIEAEIVVLPGVFSKRESGRQIIFRSDPQKEFLPLLIYELYDRLLNVDGELEVVLDISHGINFMPTLAYRAVTEVAAALAVARAEQVKLRVYQADPYPSLPREIGNRLARSDDLCKPASEDEPPSLRYNKIAEATFKLWDLSRYVAHYSERRLLTAPKDYDFGNSDELLEKALLLLGAYRLGALLQLGLLAKTTHIEDLERVMRKAVEFWRRKRRVVREINGLKLESDKKFLTGFYLLLHGHAVLRGAKKLLSESESASLDEAIVTFKEINELKKLLEGSKVVTILVDREISKLDNKVRKSGNIINDWTLYTDILEKPEEKSDGEPQREREDMEIFKRNFIAHAGFHDEVVELRMRNDIELRVRPGEWDRVKGALKEAVA

SEQ ID NO: 74 - DNA, 35 bp, Chlorobium limicola
ctttatatctaattgcactcattgaggattgaaac

SEQ ID NO: 75 - DNA, 624 bp, Chlorobium limicola
atgacctgcaacctcgacatcatggccgatcttctcctcaaggccgaaacctccacagacatcgacgtactgcgaggtctcgaaggcaaggcttcggctctctacttcgagtgttacggcatgtttttcggcaaaaacctgccgttccatacagcttcgtttctgcgggttcgacgtccgccaaccgatccggtcaacagcctgctcagtttcggctactcgctcctgcataccaacgtattctcaatggtgcaaatgagcggcctcaacccctatatcggctttctccatgcagaacgaaaaggcaatcccgccctggtcaacgatctcgtcgaagagttccgcaccgtaatcgactcactggtactctataccatcaacaggggtcttctgcatgaaaacgacttttactatcgcaaagatcagccgggctgctttctctcgaacgacgcccgaaaacgttttttacagattttcgaaacaagaatgtggcaggaatcccgggacggctacaccggcaaaacgctcaactttcggcggcatatcgaaaagcaggtgagaatcatgcgggatgtcatatccggaacccgaacgcagtatgacccgtacaagctggtatggtga

SEQ ID NO: 76 - protein, 207 aa, Chlorobium limicola
MTCNLDIMADLLLKAETSTDIDVLRGLEGKASALYFECYGMFFGKNLPFHTASFLRVRRPPTDPVNSLLSFGYSLLHTNVFSMVQMSGLNPYIGFLHAERKGNPALVNDLVEEFRTVIDSLVLYTINRGLLHENDFYYRKDQPGCFLSNDARKRFLQIFETRMWQESRDGYTGKTLNFRRHIEKQVRIMRDVISGTRTQYDPYKLVW

SEQ ID NO: 77 - DNA, 285 bp, Chlorobium limicola
atgcaattcatacttgtaacgtacgatatcgaaaacgaccggaggagaacgaaaatccacaaggttcttgaaggatatggtatatccgtgcagtacagcgtgtttgaatgttttctgtcggataacgattatgccggtcttcgtcaacggttgcagaacctgctggatcccaaccatccgctcgacagtatccgttattatcgtctctgccggaattgtgttgaaattgttgatgttgacggcaatcgtccgttcgaaatagacagtccattcgtcatttcctga

SEQ ID NO: 78 - protein, 94 aa, Chlorobium limicola
MQFILVTYDIENDRRRTKIHKVLEGYGISVQYSVFECFLSDNDYAGLRQRLQNLLDPNHPLDSIRYYRLCRNCVEIVDVDGNRPFEIDSPFVIS

SEQ ID NO: 79 - DNA, 2196 bp, Chlorobium limicola
atgggatggctctacaaccagatggcaatgcccgaaactatttttcaggcatggtacaaggtggcttcgaacgacggccgtcccggatgggataacaaatccatcgaggactactccctgcagcttgaagagaaccttaaagccctatcgcaagctcttctgacaggcacctacaaacagggtccgttgatgaaactcgtgttgctgaaacctgatggaaaggatcgggttcttttgataccaggcgtaatggacagggttgcccagactgcggcggcaatcgtgctgagcccgatcatcgaagccgaactgggtaactgtacctttgcctaccgtcccggcatatcgcgcgaaggagctgcacgggagattgaccggttgcaccgtgaagggtatcagtgggtgctcgatgcagatatccgcagctttttcgacaacgtccgccatgacctgctcttccagaggctggttgagcttatcgacgacaaggaaatgatttcgctgctgcaccggtggcttaccgctgaaatcgttgacggcatcaatccccgcatacaaaataccatgggcctgccacagggatgcccgatctcaccggctctggccaatctctatctcgaccgcttcgatgaaacaatggaaaaagaagggttcaaactggttcgcttcgccgacgattatctcgtgctctgcaaaacccgtcccaaagccgaagccgcgctgaagctttcggaaaccgcgcttgccgaactgaaacttgaactgcacagcgataaaacccgtattaccacctttgccgaagggttcaagtatctcggttacctctttattcgcgcactggttattcccaccaaaatgcaccccgaagagtggtacgacaagctcggcaagttcaagcttcgcaaaaagagcgaacatgccctgccctccgaccccgacgcaatgaccggcgaaacagcaaagttcgagctcgaaaccgatcagggcgaaaaaatagaactcaccaaaaacgagcttctgcaaaccgagttcgggtgcaagctgcttgaaagtctcgataaaaaacagttgagcgttgacgagtttctcgaaaaagttgcccggcaggacgaagaacggcagaaagagaagcgcgatgcgctgaaaaaactctattcaccttttctgaacaccctctacctgcaggagcaggggagtctcatgcgcaaggacggagagcggttcagcattgaaaaggatggagcggtcatcaacgaagtgatcgtccgccgcatcgaacaggttgtggtgttcggtaatatcgccctcaccactccggtcatgcagtactgcatgcaaaacgaaattccggttacctttctttcgcagcatggcaaatacttcggcaggcttgaatcgaccatggccgacaatgccgaaatgcagcgctatcattttcttcgttccatcgacgaaccctttgcgcttgaaaccgcccgctccatcgtttcggcaaaaatcggcaacagcaggaccatgattcgccgccgaaaatccgtcatgcaggattgcgacggcacgctgcagagtaaaatgacctgcaacctcgacatcatggccgatcttctcctcaaggccgaaacctccacagacatcgacgtactgcgaggtctcgaaggcaaggcttcggctctctacttcgagtgttacggcatgttcttcagcaaaaacctgccgttccataccgcttcgtttctgcgggttcgacgtccgccaaccgatcctgtcaacagcctgctcagtttcggttactcgcttttgcataccaacgtattctcaatggtgcaaatgagcgggctcaacccctatatcggctttctccatgcagaacgaaaaggcaatcccgccctggtcaacgatctcgtcgaagagttccgcaccgtaatcgattctctggtgctctataccatcaacaggggtcttctgcatgagaacgacttctactatcgcaaagatcagccgggctgctttctctcgaacgacgcccgaaaacgttttttacagattttcgaaacaagaatgtggcaggaatcccgggacggctacaccggcaaaacgctcaactttcggcggcacatagaaaagcaggtgagaatcatgcgggatgtcatatccggaacccgaacgcagtacgatccgtacaagctggtatggtga

SEQ ID NO: 80 - protein, 731 aa, Chlorobium limicola
MGWLYNQMAMPETIFQAWYKVASNDGRPGWDNKSIEDYSLQLEENLKALSQALLTGTYKQGPLMKLVLLKPDGKDRVLLIPGVMDRVAQTAAAIVLSPIIEAELGNCTFAYRPGISREGAAREIDRLHREGYQWVLDADIRSFFDNVRHDLLFQRLVELIDDKEMISLLHRWLTAEIVDGINPRIQNTMGLPQGCPISPALANLYLDRFDETMEKEGFKLVRFADDYLVLCKTRPKAEAALKLSETALAELKLELHSDKTRITTFAEGFKYLGYLFIRALVIPTKMHPEEWYDKLGKFKLRKKSEHALPSDPDAMTGETAKFELETDQGEKIELTKNELLQTEFGCKLLESLDKKQLSVDEFLEKVARQDEERQKEKRDALKKLYSPFLNTLYLQEQGSLMRKDGERFSIEKDGAVINEVIVRRIEQVVVFGNIALTTPVMQYCMQNEIPVTFLSQHGKYFGRLESTMADNAEMQRYHFLRSIDEPFALETARSIVSAKIGNSRTMIRRRKSVMQDCDGTLQSKMTCNLDIMADLLLKAETSTDIDVLRGLEGKASALYFECYGMFFSKNLPFHTASFLRVRRPPTDPVNSLLSFGYSLLHTNVFSMVQMSGLNPYIGFLHAERKGNPALVNDLVEEFRTVIDSLVLYTINRGLLHENDFYYRKDQPGCFLSNDARKRFLQIFETRMWQESRDGYTGKTLNFRRHIEKQVRIMRDVISGTRTQYDPYKLVW

SEQ ID NO: 81 - DNA, 996 bp, Chlorobium limicola
atgaaagcaaatatcgaactcagaacgctaacgcctatatggacgggaggcgttgagactggtaaaatggaaaggatccatgaaaccggtatcattggcaacctgcgctggtggtatgaggcaattgttcgtgggttgggaggggaggcatgtgatcctacaacgcattcttgtgcctacgatcgagaaaagccaaataatggtctttgtgatgtatgtcaggtgtttggcgcaacaggttggcggcggcgctttaatttaagtgttcacgagacacagatgcagccacagtcagttactcatcctatgagggctaaccgcatatatcaaaatcggcagggtaaaaatataccaccaacctggtatttcccgaatccaccacaaggagggaattttttaattgaagtccaaagttcgtcttccgttttttctgtggaacttgttcagggtttgattcaattatcagttgactggacagcattaggggcacgaacgcaaatggggtttggtgtaacatcgctggttagaggacgtcttaacgctaatccttttaattatttaagattaacttgctgcggctcaagtaataatttgccttccctacaaaatatgttctttgcccaaattgagaaagaaaatataaccgatcaagagacattcaatatcaagtatgatttgcgccgactttttgctggcaatcaggatgtgcgtcattttgttatgggtacagtgcaagaggagcgtattgctgcaaaaattcatgtgtcaaggccatacgcaaacggccttattcgcgtatggggttgggttcccgtggatgcaaatgtttggaatgacaagtggaatcgagatggcgtactaacccagattaaaaatcacctggaaagcaactatgctttgaaaacatggcgagaattcaataatgatcgtgatataaatcaacaatattctgatgtacgagcatacttgcacagcttatgggagagcaaaaaatga

SEQ ID NO: 82 - protein, 331 aa, Chlorobium limicola
MKANIELRTLTPIWTGGVETGKMERIHETGIIGNLRWWYEAIVRGLGGEACDPTTHSCAYDREKPNNGLCDVCQVFGATGWRRRFNLSVHETQMQPQSVTHPMRANRIYQNRQGKNIPPTWYFPNPPQGGNFLIEVQSSSSVFSVELVQGLIQLSVDWTALGARTQMGFGVTSLVRGRLNANPFNYLRLTCCGSSNNLPSLQNMFFAQIEKENITDQETFNIKYDLRRLFAGNQDVRHFVMGTVQEERIAAKIHVSRPYANGLIRVWGWVPVDANVWNDKWNRDGVLTQIKNHLESNYALKTWREFNNDRDINQQYSDVRAYLHSLWESKK

SEQ ID NO: 83 - DNA, 1272 bp, Chlorobium limicola
atgaaccagacattcaaatcattcgttgaaccctttccgcatacaatatcagaaattagtgagctgctatcaaacttaagccaagcagagcaggctatcaaagtgaataagagaaataaggaggtgcgacagcaatacgaaaaccaagctaaagatttgcaccgacaactgcttacgcataaagattgctcattgatatacaactatatggaagcgacaggcatagcggataaggatacttttcgtagcacttgggcaagggagaagctaaaagttgattctgatgagttaccagattttctcaaaccgcccctgcttgatgatttgtcctgtttgcctgtcggttcattttatattcagttcaagtttaccttgctcaagccgtatatctctcgggacgacaatgcgttttatcttgtggacaattccattgtgcgggaaaaggtttttcgctttccgatggtgcgttccaccgcatggaaaggttcattgcgccacgctctgtggcaaatggatggatatcagaaggaagaccagcaagatcagcaaatcaagcgcctattcggtacagccaatgatgaacaaccggaggaagggaacagtggccgtttttatttttacccctctttctttaccctaaacagcttggaagtcatcaacccccacggccggaaaacgcgtgtaggcacaactcctatcctcttcgaatctgtacctattggtgccgaggccactttcaccctgctatactctccccttgaccgcatcggtagagaagatgtcgaaacacgtcagcaagttattgccgacctgaaactggtagccgaagggctacgggcgttgtttatcgtatatggttttggagccaagaccagtagtgggttcggcctggctaatgatgcgattgaaaatggttctctaattctcaatttgcccagctttgttttccctcaggctgaaaccgttcaagttcaaacgccggaagatgtctttctgaaatacatggatgaatctggttatcttaaaactgttttttcaggaggcggtgactacgggttgatgagcaataaggagtatggagaaaaaagagagcagttgggtggtgggtaccttaccgagttcaaggcatttcgcaaatggtatggtgaaaacggtgaacaatggcaaaagtcaataaaagaaaaaagctcagctacgaactaccctcaactcaggtttaaaagtctcagccaattagccgagaggatgcgtcagacgggaggggaagcatga

SEQ ID NO: 84 - protein, 423 aa, Chlorobium limicola
MNQTFKSFVEPFPHTISEISELLSNLSQAEQAIKVNKRNKEVRQQYENQAKDLHRQLLTHKDCSLIYNYMEATGIADKDTFRSTWAREKLKVDSDELPDFLKPPLLDDLSCLPVGSFYIQFKFTLLKPYISRDDNAFYLVDNSIVREKVFRFPMVRSTAWKGSLRHALWQMDGYQKEDQQDQQIKRLFGTANDEQPEEGNSGRFYFYPSFFTLNSLEVINPHGRKTRVGTTPILFESVPIGAEATFTLLYSPLDRIGREDVETRQQVIADLKLVAEGLRALFIVYGFGAKTSSGFGLANDAIENGSLILNLPSFVFPQAETVQVQTPEDVFLKYMDESGYLKTVFSGGGDYGLMSNKEYGEKREQLGGGYLTEFKAFRKWYGENGEQWQKSIKEKSSATNYPQLRFKSLSQLAERMRQTGGEA

SEQ ID NO: 85 - DNA, 2817 bp, Chlorobium limicola
atgagccaactagaccaacttattcagcaccgggatgcaattcttctggcggaagcgattggctggctacatgactattggaaatgttcagaagaacaacttcagaaacagtcgcctattaatgacaaggacttaaaactaaagcccaaggaaattgcccttcaagaaataacaaagcgtttcagcagtctcggtaacaccttattagagatatcaactgcgaaagagtcactgtctgatttgcttaatcagtggcatggcaaagctggcaatgccggtgcatccttcttgttacaatatctctctcgttgccataacaccgctcattttgacaagcaggacccgcttaaaagtggcagacagaactaccctgatacgcaaatcagctctgcttttggttttgagacggctgttggctcttgtttaagcgcccaactgtgggcgcttccttgggatagtctcattactaatcatgatcatgaacgaagcactctgcggcaggcagtacaatcccttttttccaacgttggtgcagacacccgtcgccctatcaacgagatcagtttatgggattggggtttgttggttggtgctctttataaaaccgctctcgccgctgtagcgttgggtcaatctcctgttacgcatgatttgcgttggcggctacttggcattcgtactgatgcgttggcctacttctccaacgtttctcgccttccagaccttgtggcccggcaaaataccttgcaaacggctatcaacaacgtgcaaacgctactcgaaaccgtatatccggttgcaactgaggtgtatcgggatgaaaatggctctctatatgtcgtgcctgacatggcgaacttacttggcttacaagatagcagtgataagacattattgagtcttattaaagagcagttcgcttgcgatggcgaaattgtgccggatattacacttgatcctaacccttggtggggacaagaccctgttcgggctggaaatgacgaaatcccaccggctggctctatcctgtcatcaccagtaacatggaaaagcgatgccgatgccgttcgtgaggcgtggaaagaacagcggcaaacggtttgccccatttgcggtttacgttcttgtgtcaacaggcaattggattactgtcaaatttgtggtgaccgacgcaagggtcgggtaaaggaatggttacaagaacagaataaaacaatctggatagatgaggtggcagatagaaacggccgtcttgcccttatcaccggcacatttaacttaactaactggcttgatggctctctggtagaaaccatgttagtgaaagagccgacagacagcaacccctctgtccctaaaattccttcctttgctcgtttgcgtcgtatctggcaaaccacccgaaccttctggaaacagtctcaatctgacattgaccaacatctgactgatgctcgtcgtcgcctgacaatccggttagcaaactcccccaagctcacaccgaaccagacctacgagttggatctgggtggccagactcgcatgagcgttctttgggacggtaaccacttgctcagtattgataacctttcctacaccgcatcacaacttggttttccactcaataattttgaaaccaaagaaaattggacacccgaagatttagccctggatgtatgcgcatgggtaaaacagcataaagaaagctggtctggtcaaaaacaggtttttcaattgttctctgatgaggaaaaaaacaaacaattcgatatccagattggtgacatgggttatcaggacgctgcctatgcaagtaccatccccatccttgcagagccgcgtacctttatggtccttgttcctgccgactgtgctctggacttgatccatgctatcaaaaccaaatacgaacgggaaattggtaaggtgcgtaaccgtctgtccctgcacctgggtgctgtttattttcatcggcgcactcctcttcgggcagcgctggacgccgggaggcggatgctcaagtatgatctggggcagatgaaggatgaagtgtggatagtcaaggaggatgctaaaagagaactgcttcctctggagaaacagtatcttgctgaagaggagaataagcagttggccgaggcagttgctgttaaacttgaacaaaatggtcgtttcctaacttggtatgttcccgccagaatgggtgatggaaaaacggacgatagctggtatccttacgtatttatacaaaatgatgtcagcaaacgcaaacatatcttcaaagctttgcgccctaaaagcgatcacacaaccgaggagtgctggctcatccacgctacaaagttgcaggcaggtgaccgggtttacttcactccagctactttcgatttccaatggctgggcagctctggagagcgctttgaaattgcctacgaaaatggcaagagacgcaatcaacccatgcgtccatacttgctggatgaattgacgactatccaacaggcttggaaggtgattgccggtaaaggggggcttactgccaaccagatttatgctttgcgcgaccttattgaaatcaaacgtgaaaactggcaaccctcggctaatcattgggtgcaggattgctactcgcagaccggcatgttctggctattttgccgtgacgtcatcaacaacgccaactggaaaaataagcctgtcgacgaagagattaacctgctaatcaattgggctgtttccggtctgttggctgatgtgatacatctccatatgggtgtgatgaagcaaaaacctcaacgggaagaaaataatgagtaa

SEQ ID NO: 86 - protein, 938 aa, Chlorobium limicola
MSQLDQLIQHRDAILLAEAIGWLHDYWKCSEEQLQKQSPINDKDLKLKPKEIALQEITKRFSSLGNTLLEISTAKESLSDLLNQWHGKAGNAGASFLLQYLSRCHNTAHFDKQDPLKSGRQNYPDTQISSAFGFETAVGSCLSAQLWALPWDSLITNHDHERSTLRQAVQSLFSNVGADTRRPINEISLWDWGLLVGALYKTALAAVALGQSPVTHDLRWRLLGIRTDALAYFSNVSRLPDLVARQNTLQTAINNVQTLLETVYPVATEVYRDENGSLYVVPDMANLLGLQDSSDKTLLSLIKEQFACDGEIVPDITLDPNPWWGQDPVRAGNDEIPPAGSILSSPVTWKSDADAVREAWKEQRQTVCPICGLRSCVNRQLDYCQICGDRRKGRVKEWLQEQNKTIWIDEVADRNGRLALITGTFNLTNWLDGSLVETMLVKEPTDSNPSVPKIPSFARLRRIWQTTRTFWKQSQSDIDQHLTDARRRLTIRLANSPKLTPNQTYELDLGGQTRMSVLWDGNHLLSIDNLSYTASQLGFPLNNFETKENWTPEDLALDVCAWVKQHKESWSGQKQVFQLFSDEEKNKQFDIQIGDMGYQDAAYASTIPILAEPRTFMVLVPADCALDLIHAIKTKYEREIGKVRNRLSLHLGAVYFHRRTPLRAALDAGRRMLKYDLGQMKDEVWIVKEDAKRELLPLEKQYLAEEENKQLAEAVAVKLEQNGRFLTWYVPARMGDGKTDDSWYPYVFIQNDVSKRKHIFKALRPKSDHTTEECWLIHATKLQAGDRVYFTPATFDFQWLGSSGERFEIAYENGKRRNQPMRPYLLDELTTIQQAWKVIAGKGGLTANQIYALRDLIEIKRENWQPSANHWVQDCYSQTGMFWLFCRDVINNANWKNKPVDEEINLLINWAVSGLLADVIHLHMGVMKQKPQREENNE

SEQ ID NO: 87 - DNA, 993 bp, Chlorobium limicola
atgagtaatcagaatagtaaccattgccacaaacaacgctttctgttacaaactctcgatcctgttcatgttggaacaggaggcaatcggcttggtcgggtggatttgagcattgtgcgcgaaccgggaaccagattacctaaaatcccagggacctccttgcacggagcaatccggcaatatgcggctgtctgctatgagagcctccgctgcgctggagccggccaagggaacgaaagtaaaggcaaagagccacattgcagagatgcacaatgcccagtctgttatacgtttggttatatgaatggtcaggatggcggtcagagtggacagataagtatcagcgacgcccggttgttgctctttccggtttactcgcttgcagggcctgtgtgggtgacctctccgagcattttaagtgaatttggggttcctacaaacgacccttgcgatcaggtatgtcttccggatgttttgactagtcaggaacacctgaatctgggctggctaatgttggcaaaagcaagtgatcccttcaactggccggatgccataaagggggtgcctgtggaaataacaagtcgtgcagtgctggtctcggacaagcttttcagccagatcgttaacagtaatctggaagtacgcacctcggtcagtatcgacccggagaccggagcggctgtggacaaggcactctttacctatgaagccattccacgtgccactatcctctggatggatgtgattgaagatgatttcagaggcgtatttccgggcacagataaaaaatgtcggacaacaatagatgaaaaggaaggtacaaaaaagaaaacatacgagcacaatgctggtgatccactaattgaaccctggaacagaccattagatgttgttaagagtgctctcaaactggctgagatgctcggtattggcgggatgggaacgcggggtttcggtcgggtgcgactattaaatgaagggagcgaatcatga

SEQ ID NO: 88 - protein, 330 aa, Chlorobium limicola
MSNQNSNHCHKQRFLLQTLDPVHVGTGGNRLGRVDLSIVREPGTRLPKIPGTSLHGAIRQYAAVCYESLRCAGAGQGNESKGKEPHCRDAQCPVCYTFGYMNGQDGGQSGQISISDARLLLFPVYSLAGPVWVTSPSILSEFGVPTNDPCDQVCLPDVLTSQEHLNLGWLMLAKASDPFNWPDAIKGVPVEITSRAVLVSDKLFSQIVNSNLEVRTSVSIDPETGAAVDKALFTYEAIPRATILWMDVIEDDFRGVFPGTDKKCRTTIDEKEGTKKKTYEHNAGDPLIEPWNRPLDVVKSALKLAEMLGIGGMGTRGFGRVRLLNEGSES

SEQ ID NO: 89 - DNA, 38 bp, Chloroherpeton thalassium
aaaaagcgaacccaagagcttcaggcgtcgcaggacga

SEQ ID NO: 90 - DNA, 882 bp, Chloroherpeton thalassium
atgaattccatcacttttaaatgcgaaattattacgccgatgtttttagccggcgcagacggcgcaacgccggaaattcgtccgcaatctattaaaggcgcattgcgcttttggtggcgtgcattgaatggacatttgccaattgaagaattacgtaaaaaagaagctgagatatttggtggtggtggtgataaagcaatccgaagtagtgtaattattaaaacatcacacccggtgcacgatggaaaattttatcctgacatgcttcctcataaagaaaacccagggcaccgcaatcctcaaaaggcttttaaccctcaaacgccacagtcttttgtcgttaaattttcactatcaagtatcaaacataactttgatttagaaaaactaaaatctcttttcattctgacttgccttttaggtggcttaggaaaaagaagtcggcgtgggtttggaagtttccgaattacaaaaatcaaaaagaatgatcaaattgattttgaatcattcgaaatgccgacaacacttgaagatattttgccactgattcacaagtttaataccgattacgaaataaacaagtcaaataacaacatacaacttgttaaaccgagttctccagataggaaatatgaaatagaatatccttatatcgaagaaataaaaatcggcagcaaaccttactcatcatactctgatttggttacgcagatcggtaaatcttctcatgacaaccaagataaatctaatggatacgcaacgcctcgtttcgcctcgccaacttatgtttcagcattgaaaagagatgaccaatacttcccgattattacttcgttacattatgctccgccgcaatctgaaaatgatttcccaaaattatag

SEQ ID NO: 91 - protein, 293 aa, Chloroherpeton thalassium
MNSITFKCEIITPMFLAGADGATPEIRPQSIKGALRFWWRALNGHLPIEELRKKEAEIFGGGGDKAIRSSVIIKTSHPVHDGKFYPDMLPHKENPGHRNPQKAFNPQTPQSFVVKFSLSSIKHNFDLEKLKSLFILTCLLGGLGKRSRRGFGSFRITKIKKNDQIDFESFEMPTTLEDILPLIHKFNTDYEINKSNNNIQLVKPSSPDRKYEIEYPYIEEIKIGSKPYSSYSDLVTQIGKSSHDNQDKSNGYATPRFASPTYVSALKRDDQYFPIITSLHYAPPQSENDFPKL

SEQ ID NO: 92 - DNA, 1413 bp, Chloroherpeton thalassium
atggcggataaaaaaatcatagaaggtaaaattaaggtttcccctactaaaaagaaagggtttcatattgagtttgaatatgagaaagacgacttgcctaaaaaagaacctgttacttgtttcaagctacatgatgcctcatataatggaaaaccttgtaaggtaaccaaagaaaatggcaaaataataaagtttgttgtcgttttagagaatgaagaagaacagctttacccgggaaaaaataatgaacctgaaacatattcctcaccaaaacaagatatgcccgatagttttaacattgaaaaaactcggttgccttcagatacaagagacgctttgcaaaattatgttccagataattttgcgctgaagcttaataaagcggcaaggtttgattttcgttcaaaagtgcaattttttaagcaagataacgagtggatcgaacctgttatttcacaaaatttgtcagaaaaaatttcagtagaaaaggaaggctttggaaataaagaaaagagatattttgtgtttgactttaattcatcactatcagaagccgaacgtgattttttaaaaaatgataatttaagattttttcataaaacaattgatgagttatttaagaaaagtcagtacacagaaaagaaatttgaattttttgcaaatgataaacaagacaagaaaaggcaatttgaaattgatgggaagtttgataaaaaatttataagaactatcacatgtaagcacctttgctctattcgtcatctcaacttaaaattaatcagtccgctaaatttcaaagtcgactggcggctcattgtcggattaggaaatgagtcggtgtatgaaacttccatgacactgcatcacatttacggcattccatacattccggccagcgccgtgaaaggcgtggttagaagttggattattacggaagttttcggagagaaaaataatgatgacgggtcaaaatctcttgacctgaaacatgctgaagatagagccttaaacgatgaaggatttcaaaaattattcggaactcaagattcttccggcaaaatttggttctttgacgccttcccgacttccgcgccgcaaatcaaagttgatattatgaaccctcattacggggattattacggagaaaagaaagacaaatctggaaatcctattccgcccgcagattatctttcgcccgttccaattccatttctaaccgttgaaggatgttcttttcaattcattattggcattaaagaaaaggatagtaatgaaaatattcaaagcggcaaatttgaagggagaaagccgttcgacgttgcccatgaatatttgaatgaagccttaacccagcacggcatcggggcgaaaacagccgtcggctacggatatatgaaaggaaacgcttcatga

SEQ ID NO: 93 - protein, 470 aa, Chloroherpeton thalassium
MADKKIIEGKIKVSPTKKKGFHIEFEYEKDDLPKKEPVTCFKLHDASYNGKPCKVTKENGKIIKFVVVLENEEEQLYPGKNNEPETYSSPKQDMPDSFNIEKTRLPSDTRDALQNYVPDNFALKLNKAARFDFRSKVQFFKQDNEWIEPVISQNLSEKISVEKEGFGNKEKRYFVFDFNSSLSEAERDFLKNDNLRFFHKTIDELFKKSQYTEKKFEFFANDKQDKKRQFEIDGKFDKKFIRTITCKHLCSIRHLNLKLISPLNFKVDWRLIVGLGNESVYETSMTLHHIYGIPYIPASAVKGVVRSWIITEVFGEKNNDDGSKSLDLKHAEDRALNDEGFQKLFGTQDSSGKIWFFDAFPTSAPQIKVDIMNPHYGDYYGEKKDKSGNPIPPADYLSPVPIPFLTVEGCSFQFIIGIKEKDSNENIQSGKFEGRKPFDVAHEYLNEALTQHGIGAKTAVGYGYMKGNAS

SEQ ID NO: 94 - DNA, 414 bp, Chloroherpeton thalassium
atgccagaagtaaatcgtttatcgcttgagcgcggtcgtgcaaagtttgcttatgattgcgccgttgatggtagcaaaatcaataagaaaaaagaatacaaaagctatgtaaaaaagctgccaatgctcattaaggttaatggacttggggcttctatatcttttataaattcaaaatcagaaaaagatcagaataaaaaaggatattcttactacttattaagtaaccatcttaccgagtggcttacgaaaagcggaactatttctttacaggaaaatcaaggtttagcagattttattatttcacaaccatctcaaaaatatcgtcatattacaatagaagtattagcttttttagcttggttaaaacgatttgccgaaggcttaattgaaggggaagctgagggggattaa

SEQ ID NO: 95 - protein, 137 aa, Chloroherpeton thalassium
MPEVNRLSLERGRAKFAYDCAVDGSKINKKKEYKSYVKKLPMLIKVNGLGASISFINSKSEKDQNKKGYSYYLLSNHLTEWLTKSGTISLQENQGLADFIISQPSQKYRHITIEVLAFLAWLKRFAEGLIEGEAEGD

SEQ ID NO: 96 - DNA, 972 bp, Chloroherpeton thalassium
atgttccgaaaagccacacctctttttctaatatgcgaaacgcccatgcacgcgggaagcggcagtgatttgggcgtcattgatttgcctatccaacgcgaacgccacacctcattcccaaagattgaaggctcaagccttaaaggcgcaatccgacaagcttttgaggataaaatcggacaagagattaaaggtgtttgtactcctgaaaataccgtcaccgtcaatattgagcaacaatcaattaacctcaccttcgggccggaaaatgcgggaaatgacggacatgccggcgcgttgggttttaccgatgcccggcttttgcttttccccgtcaaatccatgaaaggcgttttcgcttggattacctgcccgaaagtgcttcaacaattctataaagatttttctcttgccggcatcacagatttgccgaaagttcaaggtctgtctaaaaaaacatccacttgttgcgaattgtttgtaagcggaaaaaatattgttcttgaagaatacactttttccatagacatggattgtgaatgcacaaaactttccgattggctttctaaacatgtaacgcatgatcgtttttggaaagaaaaaatgaaaagagacattgtggtgcttcccgatgaagattttactgatttcgtcaatctttccaccgaagtgattacccgcacgaaaattagtaatgaaacgggtacggtggagcaaggcgcgctgtttaccgaagaatatttgcccgccgaaagcgtaatgtattcccttgcccttgccagcccgattttcaaagaaaacgatgacgaaaaagggatttttaatctcaagaaaatgcaaaatgatgaatgcaaaaagaaaaaagaagaacagcttgtgatggaatttttcaagaaaggattacctgaagtgattcaagtcggcggaaatgcgacgctcggcaaaggcttggtgagaacaaaatccctataa

SEQ ID NO: 97 - protein, 323 aa, Chloroherpeton thalassium
MFRKATPLFLICETPMHAGSGSDLGVIDLPIQRERHTSFPKIEGSSLKGAIRQAFEDKIGQEIKGVCTPENTVTVNIEQQSINLTFGPENAGNDGHAGALGFTDARLLLFPVKSMKGVFAWITCPKVLQQFYKDFSLAGITDLPKVQGLSKKTSTCCELFVSGKNIVLEEYTFSIDMDCECTKLSDWLSKHVTHDRFWKEKMKRDIVVLPDEDFTDFVNLSTEVITRTKISNETGTVEQGALFTEEYLPAESVMYSLALASPIFKENDDEKGIFNLKKMQNDECKKKKEEQLVMEFFKKGLPEVIQVGGNATLGKGLVRTKSL

SEQ ID NO: 98 - DNA, 1389 bp, Chloroherpeton thalassium
atgaaaaaaattatcacaactgtcggcacatcgctttttaacaactttgctgaagcaaataataccgatgccattgtcaaaccaaaaaccacaggcaaaaaaggagcattgatcaatgaaccgcattcaaattgggacaatgctggagttatgaaaaatatcaatgcagtaaaaggacacaaaccatttatagactggatttccaataatcttgctacttgctgcgctgaaatttccagtctgataaaaatcgctgaaacggaaaaggatgatttggaagtctatttacttgcaaccgacacggttctttccctgcttgctgcggaaatgattcaaaaacagacaattcctcatcctcacgggaaaaaaattgatttgaagtttgagcctgaaaaagatgtgattgaaggattgcaggtattagatgcaaatgagtttcaagacattggcttgcatgaactgattaaattgattagtgaattaacttcaaattttgattttgatattatcaaagactttgcatttaatattaccggtgggtacaaaggattgataccatatctaactatcttaagtcaaatttatagcattcctgcctattatatttttgaagagtctgattccttaattaaaattccgctgcttccgattaacttcgattggcaaattgctcacagatttttgagcattaaaagaaaagttcaggattttagcagtttaaacccaagttcaaaaaaactttgctttcttagggacaacaaccttgttgaatcaaatccaccctacttccttacaccatttggcaaattgctttctgctttttctgattcagactttcaacatcaggaagataaattgggtggcggcgttatggagtataaatggtatgagaaatatgttcaagatcatttaaacgcttccgaagatattgaacaaatatatcgaagcgtcttttcagatggctcgcatacaatgtcgatattattggaagaaaaaaatgttagtatccctgcaacaaacattttacctgaggttgatttaattgtagaaacaaaaacatccataattttagtagaaagtaaagcttatagaacagccataggtaagcttgatgaggtaaaggacaggattaagagacggtgtgaattttttattgatataataacctccaagagacttgaatatcacttatgccttaaccttaaggaaaaccccgattcaaaagtattagaacggatgactaatacgaaagaagatattatttctttcattaaatcatcgactcaaatagagaaaactcatttcgaaatacattattcggtttatgatgattctcttcaaaatttaataaaatcatcaagccacgatattacattttctaacatataa

SEQ ID NO: 99 - protein, 462 aa, Chloroherpeton thalassium
MKKIITTVGTSLFNNFAEANNTDAIVKPKTTGKKGALINEPHSNWDNAGVMKNINAVKGHKPFIDWISNNLATCCAEISSLIKIAETEKDDLEVYLLATDTVLSLLAAEMIQKQTIPHPHGKKIDLKFEPEKDVIEGLQVLDANEFQDIGLHELIKLISELTSNFDFDIIKDFAFNITGGYKGLIPYLTILSQIYSIPAYYIFEESDSLIKIPLLPINFDWQIAHRFLSIKRKVQDFSSLNPSSKKLCFLRDNNLVESNPPYFLTPFGKLLSAFSDSDFQHQEDKLGGGVMEYKWYEKYVQDHLNASEDIEQIYRSVFSDGSHTMSILLEEKNVSIPATNILPEVDLIVETKTSIILVESKAYRTAIGKLDEVKDRIKRRCEFFIDIITSKRLEYHLCLNLKENPDSKVLERMTNTKEDIISFIKSSTQIEKTHFEIHYSVYDDSLQNLIKSSSHDITFSNI

SEQ ID NO: 100 - DNA, 1059 bp, Chloroherpeton thalassium
atgactaaaacacttaaacttaccgcgctcgatacattgtttttccgagacggaaggccgttttcaatgggggacgaaagttgggcaaatggcatttttccgccgccgcccaccgtaatttacggtgcactaagaacggcttatttttcaaatcatatagaccgcttttcaaagctgaaaagtcaacaagaattaaataaatccaagtatgatgaaacgttaaaattgaatattaatcaaatttattttcattataacggtggaaatctttttccaattccttttgatattttagaaaataaagacaacaatgagataacggttcttaagcctgaaaaagaattcgggttttcaaactctgaaacggaagaaattttaattacacctcaaaacggccaatttgaaaatattgagaacggatttttagaagcatccgagcttgaagcatatttgacgggagaaattcctacctcatattggaaaactgttattagctcggaaccaaaagtcggagtgggacagaataatcaaacacacgcaagtgatgatggaatgctttaccgggttggactgagccgtttggccgattatgacaacaatcggctcgaaatcattgtggaattttcagatttagaaatcccatcggctttgatgagatttggcggagaaggaaaaaccgtcgaactttccgaacacgaaataccattcataaaaccggaccctcaagaaatatttcaaggatacaattcaaagcgattcaaactttaccttcttacaccttcgtattttaccgaaggatggaaaccgacattaccagagggattaaaacttgttgccgcagcaatcgggaagcctctgcacattggcggttttgatattcaaaaggatcatccgaagcctttaagacgcttcgttcctgccggaagcatatttattatagaaattacaaatcaaaagaatctcttggattttgtcccgaattttcatggagtttcgatttccgaaacagaggagacaaagcgccaaggctttgggatcacttttatggggagggtttaa

SEQ ID NO: 101 - protein, 352 aa, Chloroherpeton thalassium
MTKTLKLTALDTLFFRDGRPFSMGDESWANGIFPPPPTVIYGALRTAYFSNHIDRFSKLKSQQELNKSKYDETLKLNINQIYFHYNGGNLFPIPFDILENKDNNEITVLKPEKEFGFSNSETEEILITPQNGQFENIENGFLEASELEAYLTGEIPTSYWKTVISSEPKVGVGQNNQTHASDDGMLYRVGLSRLADYDNNRLEIIVEFSDLEIPSALMRFGGEGKTVELSEHEIPFIKPDPQEIFQGYNSKRFKLYLLTPSYFTEGWKPTLPEGLKLVAAAIGKPLHIGGFDIQKDHPKPLRRFVPAGSIFIIEITNQKNLLDFVPNFHGVSISETEETKRQGFGITFMGRV

SEQ ID NO: 102 - DNA, 1884 bp, Chloroherpeton thalassium
atgagcaaatccgaatatctttttctttttaccgtcgggccggtgcaaagcttcattgcccaagcccgcaaaacccgcgacctttacgccggcagcgccattttaggcgaaattgttgacgcggctatacggtgcgtcggaagcgataatatcatagttcccgatgcaaaatcggttgcaaaaccgaatcggtttttggcgaaaatctatgcggcaaatgcgcttgaggcaagaaaaataggcgcggctgtggaaaaaacggctcaggcgaaatggatggaaattgcaaatgaagcgtttgaaaatgctcaagttaaaattcaaaaacagtccgggtcaccgcccgtttttaaaggtactgttgatattttaacggatagttttgtaagagaaacgtctgcgcttcaaatgttaaataccgttcgcccttgcgaagcgacctcacaaatccaaaatcatctggaaatttattgggtggcggttgaactgaacggtgactacaaggaaaaacacgatgaactccaaaagctgctcggcgctataaaaaacacccgccaatttacgcagatagatgaacctgccggaagaaaatgctcactcgatggcgagcgcaatgcgcttttttaccgccctggtgagaaagataagcgcccatatttcattcaaaacggcgcccaacaagtcgatgagttgctcacgccaggcgaagccttaagcgccgtttcgctcgtaaagcggttttttaaaaaaggtgatcaaaaaaagcagttcccatccacgccaagaattgccttgcttcatgtgatagatgaaattgagaaaagcgatgaagggaaaaaatttcgtgatctttttgaaacctcttttgatgagcttgacgagcaattgtactacgaggaaagtttgaatgaggcgtatttcagaaaaaacggttatgacgagcaactcgaaaacatctcggaaataaaagcccaacaaggcaaaatcaaagaacgatttggtaaacaaatgaccaaatactacgccattctcgtcttcgatggcgataacatgggcaagatttggtcgggcaagggctatttaaaagagcttgataagcttgagaatttccagaaagccctggcggctcatttaggtgaatatgcaaaatgggcaaaagattatttatcagaaccgaaaggcaaaaccgtttataccggcggtgatgattttctgggttttgtgaatttgaattatctctttgtggtgatgaaagagcttagggcaaaatatgatgaggaggtcaatcaaaaacttcgcaactattttgttgatggaaaacaactaaccttcaccgccggtgtggcgattgcacattacaaagagccgctttcggttgtgctcggagacgcccgcgccgccgaaaaagccgctaaagaggccttcaaagatgacggtaaagatgcttttgcgctctcggttttgaagcattcgggtgaggctcgccgctgtttgtttaaatggcaaacaggccgcgattatctgacggacaattttagccggattgttgaaaagctgaaggataagcaaaacggtttttccaacaccttcatcaaaaacatcgatcgagaatttcgcccgttgatggatgtcgatagaagaaatgatacaagccggattgacagcgcttttgacgaatcttttgagaaagaattaaaacggctattaatgaggtcaaaaaatagtgcaaacgctaccgattctgaaatcaatattctttttaattcagttaattttttaaaagactgttccgaaacgcccggaggtcatttggatgcggaaaactttttttctgcgcttcatattgcagaatttatcaaacgacaactctccgatgatgactaa

SEQ ID NO: 103 - protein, 627 aa, Chloroherpeton thalassium
MSKSEYLFLFTVGPVQSFIAQARKTRDLYAGSAILGEIVDAAIRCVGSDNIIVPDAKSVAKPNRFLAKIYAANALEARKIGAAVEKTAQAKWMEIANEAFENAQVKIQKQSGSPPVFKGTVDILTDSFVRETSALQMLNTVRPCEATSQIQNHLEIYWVAVELNGDYKEKHDELQKLLGAIKNTRQFTQIDEPAGRKCSLDGERNALFYRPGEKDKRPYFIQNGAQQVDELLTPGEALSAVSLVKRFFKKGDQKKQFPSTPRIALLHVIDEIEKSDEGKKFRDLFETSFDELDEQLYYEESLNEAYFRKNGYDEQLENISEIKAQQGKIKERFGKQMTKYYAILVFDGDNMGKIWSGKGYLKELDKLENFQKALAAHLGEYAKWAKDYLSEPKGKTVYTGGDDFLGFVNLNYLFVVMKELRAKYDEEVNQKLRNYFVDGKQLTFTAGVAIAHYKEPLSVVLGDARAAEKAAKEAFKDDGKDAFALSVLKHSGEARRCLFKWQTGRDYLTDNFSRIVEKLKDKQNGFSNTFIKNIDREFRPLMDVDRRNDTSRIDSAFDESFEKELKRLLMRSKNSANATDSEINILFNSVNFLKDCSETPGGHLDAENFFSALHIAEFIKRQLSDDD

SEQ ID NO: 104 - DNA, 30 bp, Clostridium botulinum
atttaaatacatctcatgttaatgttcaac

SEQ ID NO: 105 - DNA, 894 bp, Clostridium botulinum
atgattggaaacatagggtatttatattataaagaatattttaaagatgaatatatacatgagtgcaagatacaaagtaaaaagtatgatgaaaaaaacaatccattaataaaaatcaatcaaaaaatattggacaatagtaatatagacattttgaaaaataataaatttaaatttataaaagaaattcaagataaattatacaagaaaagaatttattttaagactacatatccaggacttatagtaggcacaggatatagccatatattaaaagaaaaagaagagtttaaattgagtttagagtttgattatacaacaggacttccagttataaatggatcatcaattaaaggaatgcttagaagtgttttttataataaaaaagatgatgaaaagctaattgaggagaaagaaaaatatataagagatattttaaaagaattaataaagaaagaaaatcctaaatttaatggagaatttgattttgaggaattaaccaataatatatttgaaggtaaatgcaaggcaaaagataaaaatggcatccatatgtcaataagtgaaagagatatatttttaggagcaacaattgatatagaggcaacaatagaagagatgaagagaactaagcaggaaaaaaataatttgcttggagaagattatgtaactccacatggtgaaggaaaagataaattaaaaaatcctaatccaattaagtttttaaaggtgatgcctaatgtagtttggtgttttggatttgatctcaaagattttaataaagatataccagcagatataaaaaagaaactattcaaacaaatactcttagaccttggaattggtgctaaaacaaatgtaggttatggtaggcttgaattcattagttattaa

SEQ ID NO: 106 - protein, 297 aa, Clostridium botulinum
MIGNIGYLYYKEYFKDEYIHECKIQSKKYDEKNNPLIKINQKILDNSNIDILKNNKFKFIKEIQDKLYKKRIYFKTTYPGLIVGTGYSHILKEKEEFKLSLEFDYTTGLPVINGSSIKGMLRSVFYNKKDDEKLIEEKEKYIRDILKELIKKENPKFNGEFDFEELTNNIFEGKCKAKDKNGIHMSISERDIFLGATIDIEATIEEMKRTKQEKNNLLGEDYVTPHGEGKDKLKNPNPIKFLKVMPNVVWCFGFDLKDFNKDIPADIKKKLFKQILLDLGIGAKTNVGYGRLEFISY

SEQ ID NO: 107 - DNA, 435 bp, Clostridium botulinum
atgaataagagagaaatagaaaaacaaataccaattgctatagatttaatagatgaatttatgaagaaaaagaaatttttaaaaaaagatgacaaagaggatgataaaaaacttaaaggaattgctaaagaatataaaggctatatatcgaattttggagctagtataattcaaagtggtttgttgtctacagtagctttttttgaagcaaatgattctaaatcaaaatcagataagcaagtgcttatggaccttattttaaaggttgtagacatatataatgaaaaacaactagaatggaaaaataatagtccttttttacattatatattagaaaataacaacaaacaaacagaagaagaagtaataaatgcagctatagctgttaaattagcaatgagagtatttaagttcacagaaaatagtgaaagttag

SEQ ID NO: 108 - protein, 144 aa, Clostridium botulinum
MNKREIEKQIPIAIDLIDEFMKKKKFLKKDDKEDDKKLKGIAKEYKGYISNFGASIIQSGLLSTVAFFEANDSKSKSDKQVLMDLILKVVDIYNEKQLEWKNNSPFLHYILENNNKQTEEEVINAAIAVKLAMRVFKFTENSES

SEQ ID NO: 109 - DNA, 840 bp, Clostridium botulinum
atggataattttaaaatatatacaataagatgtttaactaatatgcatgttggtagtggagatgcaagttatacacttatagataatcaagttcaaagagacgtaataacaggattcccaactattaattcttctagcttgaaaggaagtttaagaagtttcttagatcctaaaaaggaaaaaagcaaggcaattaaatatatttttggggataaagaagatggaatgggaaattataagattttcccaggaatgcttttgtcaatgccagtaagaagtaatgttaaaccattttttagagctacttgcccaagaataataaaggatttcttaggatttatagaaaattttcagcctcaaacaagtgatataaaaaatattaaaacattggaagaagatttaaaaaatattgaaaaagtagcagataaaaataaaaatactatatttattttgaaaaatttcaatagagatattgatgtaaagtttgacaataaccaaagaatagaaggaattaagattacttcagaacaagaaatatcattaaaaggagaagaaagaataaaagaaatatttggagaaagtttgattttaatagatgataatagttttaatgatatagtagatagattacctgttatagcaagaaataaacttgataatggagaaagtgaaaatctatggtatgaagaagttgtaccaagagaaactagattttattttgggacaattttaggaaaagaacaccaaagtgaatttggaaaaatagaaggaaaacaaccagttcaaataggtagtaatgcaactattggatatggatattgtgatataaaatctatttaa

SEQ ID NO: 110 - protein, 279 aa, Clostridium botulinum
MDNFKIYTIRCLTNMHVGSGDASYTLIDNQVQRDVITGFPTINSSSLKGSLRSFLDPKKEKSKAIKYIFGDKEDGMGNYKIFPGMLLSMPVRSNVKPFFRATCPRIIKDFLGFIENFQPQTSDIKNIKTLEEDLKNIEKVADKNKNTIFILKNFNRDIDVKFDNNQRIEGIKITSEQEISLKGEERIKEIFGESLILIDDNSFNDIVDRLPVIARNKLDNGESENLWYEEVVPRETRFYFGTILGKEHQSEFGKIEGKQPVQIGSNATIGYGYCDIKSI

SEQ ID NO: 111 - DNA, 1200 bp, Clostridium botulinum
atgagcaaatatttagttaaattaaagccagtagactcttttttctttgggggagaaaaagtttttgacttttatgatgggaaaaaaccactcaaaaataatatagttaagtcaagagaatttcctcagcaaacatcaattttaggaatgattagaaaagaaatattagttttaaatagttgtataagagaaaagtgggattatagtaaagatcaacaaaaagaaaataataagttaataggtgaaagaagttttaatataacagataaaaatgaagattttggaattataaatagtatatctcctgtttttataatagaagaaactaaagttagtgataagtttttaattaagatacctaaggatcacaacgtaaatgatagcttgaataaatataatccatttaaatttaataatgataaaggtaattgtttgaaagttaaaactaatttagtaaaagaagtatatctgccaatagattttgaggctaaaaagggtttatcagaggactttatagatattaaaactggagatattgtaagtaaaaataaagtctttataagggattgttctataggtataaaattagatgaaaatcataagacaaaagataactctttatttagattagaaaaatataagtttaagtatgataatagatatgaaagagcagacaaatgttttgcttttattttagatgtagaagaggaaaaaggaaaaattacttttgaaaattataaaaatataattactttaggtggagaaggaagtcactttttcatatcttttgaaaaagttaattttgatattaaggaaaaaatagattttataaataaagaaaagaatagttttactataaaagaaagagtacgagtagctactaataaagaagaaatcaaagaaacaaaactcatatataaaataattttactatcagatacctatatatcaaaagatatttacgaaaaaaattgcaattattcaatttcaactaagatagattttaggaatctatgcagtgataattattgcaaaaatatagatgagtatcattataaaagattaaaaaaaagtgatagtaaatattctcttttagaaaaaggatcagttttgtttgctagtaaggaaaattatgatagattaataaaaaatataaataatagtaaatttcaaaaaataggatataacatatttatttag

SEQ ID NO: 112 - protein, 399 aa, Clostridium botulinum
MSKYLVKLKPVDSFFFGGEKVFDFYDGKKPLKNNIVKSREFPQQTSILGMIRKEILVLNSCIREKWDYSKDQQKENNKLIGERSFNITDKNEDFGIINSISPVFIIEETKVSDKFLIKIPKDHNVNDSLNKYNPFKFNNDKGNCLKVKTNLVKEVYLPIDFEAKKGLSEDFIDIKTGDIVSKNKVFIRDCSIGIKLDENHKTKDNSLFRLEKYKFKYDNRYERADKCFAFILDVEEEKGKITFENYKNIITLGGEGSHFFISFEKVNFDIKEKIDFINKEKNSFTIKERVRVATNKEEIKETKLIYKIILLSDTYISKDIYEKNCNYSISTKIDFRNLCSDNYCKNIDEYHYKRLKKSDSKYSLLEKGSVLFASKENYDRLIKNINNSKFQKIGYNIFI

SEQ ID NO: 113 - DNA, 1713 bp, Clostridium botulinum
ttgactaaaaataagaaaagttatataggattaacaattggaccaatagttgaaactatcggtaatgcaaaacaaactggtgaattatgggcaagcagctatttgttttcttatataatgaaaaatataataaaaacattaatagttaaggatagagaagttaataaggatagagaacaaaatgaaaaattagaaaatagatttatacttccatgcattgatgatatcttaaataaattaagtaaaaatgaaatggaacaaaaatctattcaaaaaatagaaaataatactgataaagcagagcaagaagtgggattatttcatgatagatttatttttcaatcagaaaatggagagtttgatttagttaaagaatctataaatgaagttatagatggtatcgtaacaggaatagaaaatcacgatgtttgtaaagataaatccagggaagaaattaaatccgatatagaagatttcttaaaaatatattatttagaaatagatatagatttaaatcaagaagaaaaagagaataaactaagtagtgaaaataacattatatttaaagttaacagagcattagatgctttagaacttagagaaaaaattttaggtaataatggagttgaaaataattatattttacaaactttgaataataaacaattaaaagaacaagattttaaaaaacattttttgtctaaagatgcttatggggaaaatggaaaagatggagattatccatcactttttaaaatagcattagatgaaacatataataatgaattccctaatgaagatgagaaaataaaggaagaattaaaacaaatgggagaaaggaaaagattaaaagctaatgaatatgtagcaatagttcaagctgatggtgattccatggggagggttatagaaaaatttaaaatacataatgatagagagaacatatatgtagattataaagatttttcaagtaaattattagaatatgataagaattctcatgaaaaaattaaaaagtatggtggattcacaatatatgctggtggagatgatttactttttatagctcctgtaataactaaaaataaaaacaatatttttcaacttatagatgctttatcggggttatttgataatgagtttaaacatgaagaagaaaaaccaactacatcttttggcattgctatagtacatcacaaattcccattgtattatgctttagatgaagcacgtgatttactttttaataaggctaaaaactataaatttaatggtgaagaaaaaaatgccatagcttttaaagtgataaaaagtagtggacaatcttttgaaacagtagtaggaaagaagagtgagtcttataagcaatttaaggagctgtttaagaatgtaagtaatagtttaaatggcaaagatagaaagattaaaaattatctaaaagctatacattttaaaattaagagggataaagttatattaaataagattggtaaaaatgaagaattactggaaaattattttaaaaataatttcgatgaaaagtttcatgaaaatggtgatataaaaaaatatataaattatttgataaaattcatatacctaatttatggagaaacaaaaactgatgaagataagaataaatgcatagagcaaatatatacttatttaagatttattaaatttatggatgaagatataaatttagataattaa

SEQ ID NO: 114 - protein, 570 aa, Clostridium botulinum
MTKNKKSYIGLTIGPIVETIGNAKQTGELWASSYLFSYIMKNIIKTLIVKDREVNKDREQNEKLENRFILPCIDDILNKLSKNEMEQKSIQKIENNTDKAEQEVGLFHDRFIFQSENGEFDLVKESINEVIDGIVTGIENHDVCKDKSREEIKSDIEDFLKIYYLEIDIDLNQEEKENKLSSENNIIFKVNRALDALELREKILGNNGVENNYILQTLNNKQLKEQDFKKHFLSKDAYGENGKDGDYPSLFKIALDETYNNEFPNEDEKIKEELKQMGERKRLKANEYVAIVQADGDSMGRVIEKFKIHNDRENIYVDYKDFSSKLLEYDKNSHEKIKKYGGFTIYAGGDDLLFIAPVITKNKNNIFQLIDALSGLFDNEFKHEEEKPTTSFGIAIVHHKFPLYYALDEARDLLFNKAKNYKFNGEEKNAIAFKVIKSSGQSFETVVGKKSESYKQFKELFKNVSNSLNGKDRKIKNYLKAIHFKIKRDKVILNKIGKNEELLENYFKNNFDEKFHENGDIKKYINYLIKFIYLIYGETKTDEDKNKCIEQIYTYLRFIKFMDEDINLDN

SEQ ID NO: 115 - DNA, 30 bp, Clostridium botulinum; identical to SEQ ID NO: 104

SEQ ID NO: 116 - DNA, 894 bp, Clostridium botulinum; identical to SEQ ID NO: 105

SEQ ID NO: 117 - protein, 297 aa, Clostridium botulinum; identical to SEQ ID NO: 106

SEQ ID NO: 118 - DNA, 435 bp, Clostridium botulinum; identical to SEQ ID NO: 107

SEQ ID NO: 119 - protein, 144 aa, Clostridium botulinum; identical to SEQ ID NO: 108

SEQ ID NO: 120 - DNA, 840 bp, Clostridium botulinum; identical to SEQ ID NO: 109

SEQ ID NO: 121 - protein, 279 aa, Clostridium botulinum; identical to SEQ ID NO: 110

SEQ ID NO: 122 - DNA, 1200 bp, Clostridium botulinum; identical to SEQ ID NO: 111

SEQ ID NO: 123 - protein, 399 aa, Clostridium botulinum; identical to SEQ ID NO: 112

SEQ ID NO: 124 - DNA, 1713 bp, Clostridium botulinum; identical to SEQ ID NO: 113

SEQ ID NO: 125 - protein, 570 aa, Clostridium botulinum; identical to SEQ ID NO: 114

SEQ ID NO: 126 - DNA, 30 bp, Clostridium botulinum; identical to SEQ ID NO: 104

SEQ ID NO: 127 - DNA, 894 bp, Clostridium botulinum; identical to SEQ ID NO: 105

SEQ ID NO: 128 - protein, 297 aa, Clostridium botulinum; identical to SEQ ID NO: 106

SEQ ID NO: 129 - DNA, 435 bp, Clostridium botulinum; identical to SEQ ID NO: 107

SEQ ID NO: 130 - protein, 144 aa, Clostridium botulinum; identical to SEQ ID NO: 108

SEQ ID NO: 131 - DNA, 840 bp, Clostridium botulinum; identical to SEQ ID NO: 109

SEQ ID NO: 132 - protein, 279 aa, Clostridium botulinum; identical to SEQ ID NO: 110

SEQ ID NO: 133 - DNA, 1200 bp, Clostridium botulinum; identical to SEQ ID NO: 111

SEQ ID NO: 134 - protein, 399 aa, Clostridium botulinum; identical to SEQ ID NO: 112

SEQ ID NO: 135 - DNA, 1713 bp, Clostridium botulinum; identical to SEQ ID NO: 113

SEQ ID NO: 136 - protein, 570 aa, Clostridium botulinum; identical to SEQ ID NO: 114

SEQ ID NO: 137 - DNA, 30 bp, Clostridium botulinum
gttgaacattaacatgagatgtatttaaat

SEQ ID NO: 138 - DNA, 1299 bp, Clostridium botulinum
atgattaagttattaaaagttaaaagcttttcaacaaaaagaggggcagaatttgaaaataaagaaacatttaataaattaaaacaagaattttataaaaatccaaaaatcggtgattatgtattttgcagtatagaagaggataaattaagaggattagaatggagactttatcaagatatagataatacaaatgtatatgaacagtggcagaagtggaaaaaagatagttgtcactatggacttaaattagataaatttactaatgtttttaatggaagagaagaaagcgtaaataaaaaaattgatcaaagcattcacctaaatattgatgattatttaaaagaagataaaaatttatatgaaaacatagattttaatgtcaaggtttttgataagcttgtagtaggattaggtgaacattcagtttttgaaacagatataaaattacatcatacttatggggtgccgtatattccagcatcagcagtaaagggctgctttagatctcacattatacaaaaatattttcaaagtaaggaaaaaaaagctgaagaggataaaaactttattgaaatatttggcggagaatataaagataaaacatatagtggtaatgtgatttttatagatttatttcctaaaaattcatttgaaataaaaaaagatgttatgacaccacattatcaaaatggatatactgatgatggaaatataactcctattgaatttttaacagttgaaaatactctttttagatttatattaagaataagcaataaatgtttattgcaagataataattcaaaaatcaaattaaaagaaaatcaagatgtacgagatcttattgtagaagaattagttgaaatgatagctacacatggaataggtgcaaagacaagtgtggggtatggatattttgaagaagttacaaaagaagaatgtttggaacaaacagaaaataatgagaaaagaagagaagaagagatattagaagcaaaagaaaagaaaaaattaatgaaaatgaatgatagtgaaaaaaagttatatttggttgaaaaaatatctgattgtgaaaaaagaaaagaaggattaaggaaattatttacaaatagaaaacaagaagaactagaacaaacggagatagagaaattggccaagctaataaaaagagatttagaagattcaggtaaatggagatataagataggaaagaaaggaaagaaaaataaagaactagaacgaatagaaaaaatctgcgaaatattaaatatagatttacctaaaaatagtaattag

SEQ ID NO: 139 - protein, 432 aa, Clostridium botulinum
MIKLLKVKSFSTKRGAEFENKETFNKLKQEFYKNPKIGDYVFCSIEEDKLRGLEWRLYQDIDNTNVYEQWQKWKKDSCHYGLKLDKFTNVFNGREESVNKKIDQSIHLNIDDYLKEDKNLYENIDFNVKVFDKLVVGLGEHSVFETDIKLHHTYGVPYIPASAVKGCFRSHIIQKYFQSKEKKAEEDKNFIEIFGGEYKDKTYSGNVIFIDLFPKNSFEIKKDVMTPHYQNGYTDDGNITPIEFLTVENTLFRFILRISNKCLLQDNNSKIKLKENQDVRDLIVEELVEMIATHGIGAKTSVGYGYFEEVTKEECLEQTENNEKRREEEILEAKEKKKLMKMNDSEKKLYLVEKISDCEKRKEGLRKLFTNRKQEELEQTEIEKLAKLIKRDLEDSGKWRYKIGKKGKKNKELERIEKICEILNIDLPKNSN

SEQ ID NO: 140 - DNA, 480 bp, Clostridium botulinum
atgggtgatttaaaaaatgttaacctccaagttgctcaatttgcattagaaaaagtaaaggaagttttaaattattatgaaaaagaaattttaaagtgtaaagaagaggaaagagaacaaatagagaagaagcaaaaaatgctttctagtaaatataaaactctttctaagaaaatgactgttttaatacaaaaaaatggtttaataggaacattagtatttattttatctaaagtaaaaaaagaaaaagcaaatgaacttgtgctacaacatataataaattggtgtgaagaagattgtaaattagattttttaagagttgataaagaaaatactaatcctaatgaagcttttatagaaaatattactaaactttcaaatcaagaatacagattagttacaaaagaaataatgaatttgtttggatggattaagaggtttactgatggaatgattgaaggggaagtacaaaatgattaa

SEQ ID NO: 141 - protein, 159 aa, Clostridium botulinum
MGDLKNVNLQVAQFALEKVKEVLNYYEKEILKCKEEEREQIEKKQKMLSSKYKTLSKKMTVLIQKNGLIGTLVFILSKVKKEKANELVLQHIINWCEEDCKLDFLRVDKENTNPNEAFIENITKLSNQEYRLVTKEIMNLFGWIKRFTDGMIEGEVQND

SEQ ID NO: 142 - DNA, 864 bp, Clostridium botulinum
atgtataaagataaagaaactatatatattaaagcaattagtccaattcatgcaggaagtggacaatcattaacaagtgtagatatgccaattcaaagggaaagccacagcaatatacctaaaattgaagggtctagtttaaaaggatcagtaaaacataatgtttatcataaattaagagttaataaagataacaaaaaagaagaacataaattatttgaaaagatgtttggatctgaggatggaaatgattgtgcaagtgctatatctataacagatgcaaaacttttattatttcctatgcgttcagcgatagatatatataaattaataacttgcccatatgtacttaaaagatggaaagaagaaacaaatcaaagttttgaagattcaatcttagagaatatagaagatggtcattgtgtaataaatcaaaactctcctttattatctaacgataaggtaatgctagaagaatatatatttgaagcacgtaaagaagatttaagtattttgtttaatgggagttttgaaaatttacaaataaataaagtagttatattatctgatagcgattttatagatatggttacaatgtatacagaagttataactagaaataaaataaatgttgagactggaacggcacaaggaacaggattattttcagaagagtatttaccagcagaaactgttatgtatttttcagtattagagtctgctttttataaaggcgaagaagaagtattaaaatattttaatgaaaatattggcggaatatttcaagttggaggaaatgaaactataggaaaaggtattgttaaagttattaatcacgatttactaaagggggtaactgaataa

SEQ ID NO: 143 - protein, 287 aa, Clostridium botulinum
MYKDKETIYIKAISPIHAGSGQSLTSVDMPIQRESHSNIPKIEGSSLKGSVKHNVYHKLRVNKDNKKEEHKLFEKMFGSEDGNDCASAISITDAKLLLFPMRSAIDIYKLITCPYVLKRWKEETNQSFEDSILENIEDGHCVINQNSPLLSNDKVMLEEYIFEARKEDLSILFNGSFENLQINKVVILSDSDFIDMVTMYTEVITRNKINVETGTAQGTGLFSEEYLPAETVMYFSVLESAFYKGEEEVLKYFNENIGGIFQVGGNETIGKGIVKVINHDLLKGVTE

SEQ ID NO: 144 - DNA, 1272 bp, Clostridium botulinum
atggaacataagaatgtagaacatttagttattttttcaactttaaaccaaataacaaattatatagcaattaaaaatttaaaacctaaaaatatttataatataacttttgatcaggggtttgcagatacattaaagcaagggatagatcctaaaaaatgggatgataatttaaaaaatgtactgaatgatgaaaacattaagcccaaaagaaaaaatatagaaataaaacaatgtatgtatatagatttagaaaaattcaaagaagaacttgaaaaaaatatagaatatgttgatgaagatacacctatctattggcatattactggtggacaaagaatatttgccatagctatacatgatatagtaaaaaaacgtcctaatgatattatattttaccttgaaggaaattctgaaaaaattatttatataggaaaagaaaaaactaaatttgagtatgaattaaaagacttagattttagtacagcttttaagcttatgggatataatactgaagatttagattcaacaagaatattaaaaggaaaaataaaaaagaatgataaaaatgaaaagctaaaatatgataaaaatgagatgaaattttatcatagattatatgattggattataaataacgatggagaaaaaactaaatcacatattgctttttctataggtgataaaaaatttgaaggaacttttaaaaaattattattagagtcaaattcaataaacagaactataagacaagaatttttaaagaagttatttgaggagttagaaaagaaatccccaagtcttaaaaaaatagagtacaattttataaattcggatgagatgaaaatggaatttccagcaggatatatttttgaaaagttaacagggtatcaaatatataaagttgtagaagataatactagaattttaggtatggctatgagtttaaaagtatacaatgaagaggggggacacagtactgatgaacttgatatagctcttttaactaatacaggaagaataattaattttgaatgtaaatctggaagtttaaaaggggataatgctaaaagtcataaatttactacctattctctttcaggggtatttggagcaccaatattcttaactcctttaacatacaaaggtgagaagttagaaaaagaactagataaaaaattacattcagcatgtaaagcagctgatagagcaaatttagaaaaaatttatttaaaagatataaaagaaaaagtaaaaaaattaatagggtaa

SEQ ID NO: 145 - protein, 423 aa, Clostridium botulinum
MEHKNVEHLVIFSTLNQITNYIAIKNLKPKNIYNITFDQGFADTLKQGIDPKKWDDNLKNVLNDENIKPKRKNIEIKQCMYIDLEKFKEELEKNIEYVDEDTPIYWHITGGQRIFAIAIHDIVKKRPNDIIFYLEGNSEKIIYIGKEKTKFEYELKDLDFSTAFKLMGYNTEDLDSTRILKGKIKKNDKNEKLKYDKNEMKFYHRLYDWIINNDGEKTKSHIAFSIGDKKFEGTFKKLLLESNSINRTIRQEFLKKLFEELEKKSPSLKKIEYNFINSDEMKMEFPAGYIFEKLTGYQIYKVVEDNTRILGMAMSLKVYNEEGGHSTDELDIALLTNTGRIINFECKSGSLKGDNAKSHKFTTYSLSGVFGAPIFLTPLTYKGEKLEKELDKKLHSACKAADRANLEKIYLKDIKEKVKKLIG

SEQ ID NO: 146 - DNA, 1104 bp, Clostridium botulinum
atgaagtttctaaaaattaagccttatgataatactttctttagattaggtaataattttgaattcaagataagtaatgtaattcaaactaaaaatgtggcatatccttcgactttttttggagccatttttacagcaatattagctaacaatgatgagtttagagaaagttttttaaacattccaggtaatactgatcatttagaaatactgaatattaaacaaatatacttatatgctgagaaacaaggaatgatttatattaaagcaccaaaggatatatttgttaataataatgaagtcaagtttggaaattttaaagaaataaaagatggagaaagttctattaagtatgattattacttagaagaaccagatggcaatgaattagaacgtgcggataactattttgtaagcataaaggagttctatgataagtataggtacaaggttttagataatattgatttaaaacaagaagatgaaatatttgcaaaaaatattaagacaggtatagctctagataagagtacaggaattgtaaaagaaagcttattatatactattgaacaaactgaatttaaaaatataacagaagattattacagcaatgactggagctttgttgttgaatatgctatagataacgattttcttaaaaagcagggttatcctaaagtgaaaaacttggataaaggagagttaaaacttggaggagaaacaaaagtttgtacttatgaaattatagaaaattcggatatcaatgagtttaagtcaaaaacgagccaaggttttttgaaaccaggtgaaaaattaaaagtaatattaacaagtgatagttattttacaaaatcttttgcagaactttttaatgatgagatgaaaattttagcattagttaatgataaacctatttatatagggggttttgatgtagcaaaaaatgaagaaaaagctatgtataaaggttattctgctggaactgtattgttgctgcaaaatgagtcaggtaaagatattaatcttcagaaatatttagatatgaagcttagaaataaactaaaaaatggatttaatgaatatatttgtgtgaaaggagaataa

SEQ ID NO: 147 - protein, 367 aa, Clostridium botulinum
MKFLKIKPYDNTFFRLGNNFEFKISNVIQTKNVAYPSTFFGAIFTAILANNDEFRESFLNIPGNTDHLEILNIKQIYLYAEKQGMIYIKAPKDIFVNNNEVKFGNFKEIKDGESSIKYDYYLEEPDGNELERADNYFVSIKEFYDKYRYKVLDNIDLKQEDEIFAKNIKTGIALDKSTGIVKESLLYTIEQTEFKNITEDYYSNDWSFVVEYAIDNDFLKKQGYPKVKNLDKGELKLGGETKVCTYEIIENSDINEFKSKTSQGFLKPGEKLKVILTSDSYFTKSFAELFNDEMKILALVNDKPIYIGGFDVAKNEEKAMYKGYSAGTVLLLQNESGKDINLQKYLDMKLRNKLKNGFNEYICVKGE

SEQ ID NO: 148 - DNA, 1746 bp, Clostridium botulinum
atgtcttatttattaggagttacggtgggacccatacaaactaatatacaaaaatcaagaaaattaagagagttatataattctagtaaaattgtttcagatatgatgaaaaaagtaatagaatatcttaagataagagatgagaccctaaaaattatttatccgtcaataaaagatgtaaatgataccaaaacagacattaccaattatttgatttgtgaaataaataatatagatgatttaaaggatatgagagaacgtgtttttgatgaattaaaaatatcagttttagaagaaatatattttatgttttgggcagttgaacctttagaagaatattcaaaaacatataaaaaattaactaaaaaattaagaagtataaaaaatacttatgaatttaaaaattatgaaaaagatgtaagaatcaaaaaaaaatgtagcttgtgtggagaaagaataagagaagatgcaagtgagttgtgtgaagtttgtaatcgtaagagaaattatgatcaaactagtaattggaaaaataataataaaggagaaaaatataaatcagtatatgatatttctatagatgcttggaaagaaaaatataacgaggatttattaagcttgaataagaatttagaagatttgtttaataatactagtaggtactatagtttagacacagtgtccaatattattaaatgtttaaaaatagatcctaaaaaagtaagaaaggaaaaagaaattgatgaagatctagaaaatcctaaaatggaagccctagaattaatagcagaattaaagaatataagatttgaacttgaaagtatttatttaagaggtgaaaagcctgtttcaaaaccacattacaaatattgttttattcaaattgatgtggatgatttaggaaaatggattagtggtgtatataattatgaagaggagaatttaaaagagaatcagatacaaatttcaaaagctttgtgtagttttgcatataaattaaaagaagaatttaaaaacagcaaaactaaagttatttatgcaggaggagatgattttttagcagtacttcctgttgagtgtttattaaatactttaaaaataatagaagaaatttttaaaagtacagtacaaaataatatagataacagccttaattattcacaaaaaatttcatattctgcgtctgtaactattgcaaattgtaaagatgaaatgtcactagctttaaggaaaaatcgtgaagccttagaaaaagttaaaaatcgttattatagtaaaaatggtatatgtataaattatataataaataccagtaaaatcattaatatgtttttattaaaagattattttaatgaatatgtagacaaccttcgttactttaaaaaggtagaaaaatatatgtcttttacttatattgatgcaatagaaaatgaatttagtaaaatgaaatttgaagatttagaaacagatgattttctgaatataaaagatatgttactacttgagtttgaaaggcacttaaatttaaataagaataaagtaccaaaagatagtgaggaaggtaatgaaaattttttagaatattttaaaatacatacaagattatttgaaaatataattaatgataatgaaattgataaaaaaattgattttattaatattataaattgttttagaatatataaaaaattgacagattttcagtttaaagaggaggcgaaatgggatgaagtttctaaaaattaa

SEQ ID NO: 149 - protein, 581 aa, Clostridium botulinum
MSYLLGVTVGPIQTNIQKSRKLRELYNSSKIVSDMMKKVIEYLKIRDETLKIIYPSIKDVNDTKTDITNYLICEINNIDDLKDMRERVFDELKISVLEEIYFMFWAVEPLEEYSKTYKKLTKKLRSIKNTYEFKNYEKDVRIKKKCSLCGERIREDASELCEVCNRKRNYDQTSNWKNNNKGEKYKSVYDISIDAWKEKYNEDLLSLNKNLEDLFNNTSRYYSLDTVSNIIKCLKIDPKKVRKEKEIDEDLENPKMEALELIAELKNIRFELESIYLRGEKPVSKPHYKYCFIQIDVDDLGKWISGVYNYEEENLKENQIQISKALCSFAYKLKEEFKNSKTKVIYAGGDDFLAVLPVECLLNTLKIIEEIFKSTVQNNIDNSLNYSQKISYSASVTIANCKDEMSLALRKNREALEKVKNRYYSKNGICINYIINTSKIINMFLLKDYFNEYVDNLRYFKKVEKYMSFTYIDAIENEFSKMKFEDLETDDFLNIKDMLLLEFERHLNLNKNKVPKDSEEGNENFLEYFKIHTRLFENIINDNEIDKKIDFINIINCFRIYKKLTDFQFKEEAKWDEVSKN

SEQ ID NO: 150 - DNA, 1182 bp, Clostridium botulinum
atggaaagagtaaaagttactttaggagtagtaacagatatgtttagtgaaggcgtaaatagtaataaagaagctgaatttagaataacagagctaaaagcactattacgttcaacttttagagaatttttttattatacaagcttagatgatttgaaagaaaaagaagaattattatttggaagcacaaataggaaatcaccagttattataaaatttggacgaaataataaaattagatttaaggataagaaaaaattggtgttgcataaaaatatgtttaaagaagcaattccaagtggaactacaataaatattatatttcagagtagatatgaaaaatatttaaaaacatatgtatatactttaaaattggcatcaattatgggagctttaggaaaacgttcaagaaaaggtatgggagcatttaaaataataaaaatagatgataatgaaataattgatattaataaaagcgttgaagatttattatgtggttatgaagaacaatttaaaataaatgagaaaatataccttattaaaacgagaaagcttttaaaagaaaaacaatataaagataattgtactaaatataaaatagaatgtgatgctaatatgccgaagaatgttaattatgtaaaaaatatttataaaatttatttaggtaatttaacagaggagaaaagtagaaataaaatagattgtactttaagaaacttttcttggctaaatcattatagattaagtgatctaaataagattttttctaacgaaacaataaaaaaaatagaaaaggaaacaggtaaaagaattgataatgaaataagtttagaaaatctttttaataaagagatattaggaaattataattataaatataaggaaaaagaagttactaaaaaaaatatattaacaagatttgcgtgccctgtttatgtaactatttatcaaaaatcacggggtgagctcatagaaaactatcttattataaaggaattaaattatgactatgtttataaaaagatacttgataaaaaagtatctaataaaaaagtaacggagcaaaagaaagaagaaataagaacagatattaaatcagaattaaaagaaatgaaaccaatagacaaatattatgttgaagaatttgtaaaaaaaataatagaatgttgtgaggtgaaatag

SEQ ID NO: 151 - protein, 393 aa, Clostridium botulinum
MERVKVTLGVVTDMFSEGVNSNKEAEFRITELKALLRSTFREFFYYTSLDDLKEKEELLFGSTNRKSPVIIKFGRNNKIRFKDKKKLVLHKNMFKEAIPSGTTINIIFQSRYEKYLKTYVYTLKLASIMGALGKRSRKGMGAFKIIKIDDNEIIDINKSVEDLLCGYEEQFKINEKIYLIKTRKLLKEKQYKDNCTKYKIECDANMPKNVNYVKNIYKIYLGNLTEEKSRNKIDCTLRNFSWLNHYRLSDLNKIFSNETIKKIEKETGKRIDNEISLENLFNKEILGNYNYKYKEKEVTKKNILTRFACPVYVTIYQKSRGELIENYLIIKELNYDYVYKKILDKKVSNKKVTEQKKEEIRTDIKSELKEMKPIDKYYVEEFVKKIIECCEVK

SEQ ID NO: 152 - DNA, 690 bp, Clostridium botulinum
atggaattttgggaactgattgtaacagcgatgttgaaaaaagacatatattttgaagattgtgggtatataatagggaaaaatataaataaaagtatgctttgggataaggacttaaaggaagtacatccaaagaaacagtataaaaattatgtgtttaatagtttttatcctatagaaagagataaattttataaaaaagataggttgtatatttttaatattaggggattaagtaaagaatttatagataaaatagaaacttgcttatgtaatttagaaagtaatgattttaatgttatttcaacttctaaaaaagagattaaacaaagatatatcaaagaattgtatactcaaacaccattaataataactgtagatgataagccttggctccaaaatgatggggatttagatttgtttaaacaaagattagaagataacttagaaaagaaatataaaagcttttttaatgaagatatagatgtaaaaggtaaattcataaagagcatagagtttaaaaatagaaaaccaatgcattataactataagaatgggaaaaaattattggctaataaagtaagtatacagattgaagataatgaagaagctcaaaaagtggctttcttagctagagcaatcggattgggtgagaaaaacccatcaataggagcggggttttgtaagtag

SEQ ID NO: 153 - protein, 229 aa, Clostridium botulinum
MEFWELIVTAMLKKDIYFEDCGYIIGKNINKSMLWDKDLKEVHPKKQYKNYVFNSFYPIERDKFYKKDRLYIFNIRGLSKEFIDKIETCLCNLESNDFNVISTSKKEIKQRYIKELYTQTPLIITVDDKPWLQNDGDLDLFKQRLEDNLEKKYKSFFNEDIDVKGKFIKSIEFKNRKPMHYNYKNGKKLLANKVSIQIEDNEEAQKVAFLARAIGLGEKNPSIGAGFCK

SEQ ID NO: 154 - DNA, 29 bp, Cyanothece sp
ctctcttttaataagagaacttagttgaa

SEQ ID NO: 155 - DNA, 360 bp, Cyanothece sp
ttgcgaggggtaaaatcaacatttatctttgattctcagcaaaaatcccccgaagcaatcacacacacaggacaaaaaattgatgtgttttatgttgttacctatgatattgtatgcgatcgccgtcgtaaaaaagtgtctgatcttcttgaaggctatggccaacgggttcaatattccgtgtttgaatgtgttttaactaaagcgcaatataaacagttatgtacccgaatgaaggaacgagtcaacttagatgaggatagcatccgtttttatcctatttctgatcatacattaggacaagttgaactctggggagggaaagacctcacaaaacccccgtcgtctaccattgtctaa

SEQ ID NO: 156 - protein, 119 aa, Cyanothece sp
MRGVKSTFIFDSQQKSPEAITHTGQKIDVFYVVTYDIVCDRRRKKVSDLLEGYGQRVQYSVFECVLTKAQYKQLCTRMKERVNLDEDSIRFYPISDHTLGQVELWGGKDLTKPPSSTIV

SEQ ID NO: 157 - DNA, 993 bp, Cyanothece sp
atgaaaactttatatgtgtctcaacagggctgttatgttaaacttgaccaagaaactttaaaagtggagaaaaaacgacaacttttagcagaaattcaattacccttaatcgaacaagttcttatttttggtaaatctcaaatgactacccaagcgattcgtgcttgtctttggcgcaatattcctattgtctatctttcacgaatgggttactgttatggacgtattatgtcccttaaacggggttatcgtcatcttactcgttatcaacaacaattagatttttcgcaacgattattaaccgcaagagaattggttaaagctaaactaaaaaattgtcgcgtcattttacaacgacaacaaagacggttacaatccgataaacttctctttgccattgatagtttaaactatttaattgaacaggccaatcttgctgaaaccatcgagcgattaatggggtttgaaggagtcggcgcaagcacttatttttctgcctttggtgactgtttaaccccgtctgaatttatttttctagcccgttcccgtcgtccccctggcaacccagttaatgcgatgttgagttttggttatcaggtgttatggaatcatttgttagcattaattgaactacaaggacttgatccctatcaagcttgtttacatcagggttccgaacgtcatgccgctttagcttctgacttaattgaggagtttcgcgcccctatggtggattctttggtgttatacctggttaatcgtcggattatgaacgctgacgatgattttgaatatcatgatggcggttgctatctcaataatacgggacgaaaaaagtatctcaagcattttgtacaacgtatggaggaaactgtacaaaccacccccgatgaaaagcaaccccgttgggatcttctcatgcagcaggttaaacgatataaagcatttgtctattcccctgcttacggttatcaaccttatttaatacgataa

SEQ ID NO: 158 - protein, 330 aa, Cyanothece sp
MKTLYVSQQGCYVKLDQETLKVEKKRQLLAEIQLPLIEQVLIFGKSQMTTQAIRACLWRNIPIVYLSRMGYCYGRIMSLKRGYRHLTRYQQQLDFSQRLLTARELVKAKLKNCRVILQRQQRRLQSDKLLFAIDSLNYLIEQANLAETIERLMGFEGVGASTYFSAFGDCLTPSEFIFLARSRRPPGNPVNAMLSFGYQVLWNHLLALIELQGLDPYQACLHQGSERHAALASDLIEEFRAPMVDSLVLYLVNRRIMNADDDFEYHDGGCYLNNTGRKKYLKHFVQRMEETVQTTPDEKQPRWDLLMQQVKRYKAFVYSPAYGYQPYLIR

SEQ ID NO: 159 - DNA, 288 bp, Cyanothece sp
atgtatatctcaaaaagggctgcgtttgtgcgtaatatagcagcatctgctatcaattgtattgttacccttactcttttattaattgcccccttgggtttagctgcagttattactaatacttttctggtcacattttctacttttattgtctgttcaatttgcgattttatcatagtttggttatccttttcacctccaccgaaacggattattcatcaatcaggaaatctgacccgttggcaacaatcccaacaaattgaacgtaaaaatattgataaggaatga

SEQ ID NO: 160 - protein, 95 aa, Cyanothece sp
MYISKRAAFVRNIAASAINCIVTLTLLLIAPLGLAAVITNTFLVTFSTFIVCSICDFIIVWLSFSPPPKRIIHQSGNLTRWQQSQQIERKNIDKE

SEQ ID NO: 161 - DNA, 1245 bp, Cyanothece sp
ttgggtatcctgtataaaaatagtcttttacttgacagtatgaaaaataagtttaaacctcatcgttattctgatttagaaagctttgaacgcttgttattattgatagcaatcttggtaaaatatccaggcgtgggttatcgtgatcgcaatttattagatacaacagaaattcattacaatgctttagaagaagtcaagttttatttacaaaaattagccgatcagttagggatagatttacctgaagattatccagcgatcactacattacgcaaagacttagaaaccctaaaagattatcagattttagaaaaaagaatgtatcgttggggttactatttagggacaggggtgatgtctcccttagaattaaaaattgctttagatgccttagaatctttagctatcaaacaaggcgatcccagaattcggaaaattactgaacaatttaaaaagcggttacgaggttttgcagcattagaagatcagcaactcttttatcctgttcgacaacagcttaatcatgccataaactacactgatcccgacgaaatgatggaaaaaggggtttatcgtcaaactctttttcatcatatccatatcttagaaactgctattatcgaaggtcaaattatcgaaatttctagaaaaaaagatttatatgataataaacgagtgggaatcatgaaagtttatcctttacaactcatttatcataatgtggcttggtatttacttcatgaagattataaaaatgaacatttagttatcagtcgagttaaccgtttagggaattattgtaaaatcctcgaaccatcaggaagaggaatcaataaacaaaaacaaagcctcacgaaagcttatcaacttctagaaaatggatggggattaaaattaggaaatttagaagaacaaaaacaagagttagcaggaaaactaaacttcgttaaagcaaaagttcgctttttttatcccgtcagtcagtttatagaagaaggggaacgccgtcatcccaaacaaaaaattaagcgaggaaaaattgatcctcaaacccatcaaccccaatatattgattattctgttgctttacccctgcgatcgctagatgagttttacttctggttaaacagttacggggaatatgtgcaagtgttggccccgtctgagttggtggagagacatcagcgatcggccttaacattagtttctcgttatggctgcaataaagataatatcacctaa

SEQ ID NO: 162 - protein, 414 aa, Cyanothece sp
MGILYKNSLLLDSMKNKFKPHRYSDLESFERLLLLIAILVKYPGVGYRDRNLLDTTEIHYNALEEVKFYLQKLADQLGIDLPEDYPAITTLRKDLETLKDYQILEKRMYRWGYYLGTGVMSPLELKIALDALESLAIKQGDPRIRKITEQFKKRLRGFAALEDQQLFYPVRQQLNHAINYTDPDEMMEKGVYRQTLFHHIHILETAIIEGQIIEISRKKDLYDNKRVGIMKVYPLQLIYHNVAWYLLHEDYKNEHLVISRVNRLGNYCKILEPSGRGINKQKQSLTKAYQLLENGWGLKLGNLEEQKQELAGKLNFVKAKVRFFYPVSQFIEEGERRHPKQKIKRGKIDPQTHQPQYIDYSVALPLRSLDEFYFWLNSYGEYVQVLAPSELVERHQRSALTLVSRYGCNKDNIT

SEQ ID NO: 163 - DNA, 3084 bp, Cyanothece sp
gtgagtcatctgtatcatccgtattggcaagcaaaaatttgggcattactgcatgatccagccttaaaacccttatcggatcgatatggttttgcgagagaggggcaatggcagttattgcgatgtatgcaaggatgtaagtcccctaaagataacaaaaaggtgttaggagactgtgtattgcagggtaactggttaaaccatgtggggttatgtgatttagtcgcttcggccagcgatcgcagtaccatcggcagactcgatccacaatatagcgcagttacctatcaacagcaaaccggcttacagatccgtcatttattatcaggagaaccccaaaaccttaaagttaataataactggcaagaaaacttaattactaaacggaagaaactagaagcaaaagaagcagaatttttagataaaattagccagtgggaagatccaaaaaaagttttttgggcgttatggagatgttatgctgaagtcttagaaaaagaagaagctttaatacatttattaccagcagaaactcgtttaccggatggatcattgtggagtcatgtgagtatgacttctgcattagctggagggttagccgggtattataaacaagctgaaaattatcctattaaaaaccaaaaatttaatgattattctcgaccgtatttagttaattttaccttttctcctgtacaagaattgatcaaagcgagtcgcaaaatgcgagatttttgggcaggatcttggattttacattatctttctgctaaggtttcttatgcgatcgctaatgaatatggtcccgatactttactctatccttgtctgtatcaacagccattaattgataactggttattagaagaatattctgatttcaaggaatggatagaacctcataaacccgatcaattattaacggcaggtttccctaatgttattattatgattttacccaataatcataaatctcaacaggatctaaaagataatcctatttatgcagcgactcagttagcaaaacgtactttaaaagaagaatggaaaaagttaggagatcaaagtttagaatttttacaagatagtaaacagtggcaaaatattaacccaaatacttgggataaatggttaaagtgtcaatggcaaacttattatacagcctttcctattggtgatcctgagagtgacttaacttgttctttaagagtgggtaaaaatgaaacggaagagcaaaaaaaagacgcttttgaagcttggtgtcatcaacaaaatcagttaaccaacccgaaagaatctttatttgaaaccaatgaagagaaatttttaaaagctatctttaaactaaccgatatagaaacagaaaaagaaccaccaaaaacaaaatatagtaagcaacctaacttaaatgtaggatcatggtgggcttatgtttttgatcaattaagaaccagtttaaatgcagttaaaaatgctagaacttgggaacttcccacagcctttaccgttcgttctagcttatcaggaatcggttctgcagttcatcctattgtcaatgaagagaaacccgatcgcatttctgaaaaagaaattaacgagttttggtcagaaaaattcggtttatttgatggtactgaaaaactcaatgcaacggaaattgtcaagcgagtgttacataaattattacctgagatattgaactatgaagaacaagaaatcagcttatattatcctgatttaaccgccggagtcgccggttatttaaaaaatgcactattaaacaatcaacagtcagaaattgattattataaacgttcttgtcataagatttacaaagaaattcaaccgcttttagataatgataaccttagccaaagttggggtattccttggattaataataataaagaattgaaactgagtaataccattcatcatcctcgtttactcaatgcaggttggttactcgaagatgtagaaatatcccatgatagtaatatagagtatcgagaaaaattagaagaattaagtacaaaaagaacaactatacaacaagttatcaataaatattatcctagtaataatcctaccaattggtatattttagttgctggtgatggtgatagtatgagagactggttaagaggtagtaaattaaaaaattatggtgaatatttgcccgatgaattaagagaaaaaattattaatgatagtaatgatgaaattcctaaagaatataaagaacccttacaaaactttctcgaagttagaaaacgtatgggaccatcaacccatagtgctttaagtcgtgccttacttgacttttctaatcaattagttccttatttaaccgaacaaagatacgcaggaagattaatttatagtggtggcgatgatgttttagcttatacaaatttatgggaatgggacaactggttatgggatattcgtcaatgttttaagggtcaagaagatccctataatgagtttaaaaatgagggtgactattggcaatggaataaaccaaataaacccaaaaatatagcccaaagacctttatttacaatgggaaaatgtgctactattagctttggaattgtgattgctcatcactctattccgttagcgatcgctttagaaagtttatgggaagcagaagaagaagctaaagaacattacacacaaaaagataataaagacacttacaaagatgccgtacaagttcgagttttgtatggtaatggaaacaccttaaaatctacatcaaaatttgatatttttaaccagtggaaacaactgctaaaattagacttagaacccagtttatttgaacaagctgctaccatttgggaacaacatcctatcccagataaaagtgcaattgaaccctggacaaaagccttttgtagtcgtcgagatataggagaagaattacaacaagactatcaaaaaatattaaccagttttattcaaggattatggataacgacccctcaaaataacttagataaagaggttaagaactggctaaaactggcagcatttgtgaaacgaaatcgtaaaattagcttaaaccaggagtaa

SEQ ID NO: 164 - protein, 1027 aa, Cyanothece sp
MSHLYHPYWQAKIWALLHDPALKPLSDRYGFAREGQWQLLRCMQGCKSPKDNKKVLGDCVLQGNWLNHVGLCDLVASASDRSTIGRLDPQYSAVTYQQQTGLQIRHLLSGEPQNLKVNNNWQENLITKRKKLEAKEAEFLDKISQWEDPKKVFWALWRCYAEVLEKEEALIHLLPAETRLPDGSLWSHVSMTSALAGGLAGYYKQAENYPIKNQKFNDYSRPYLVNFTFSPVQELIKASRKMRDFWAGSWILHYLSAKVSYAIANEYGPDTLLYPCLYQQPLIDNWLLEEYSDFKEWIEPHKPDQLLTAGFPNVIIMILPNNHKSQQDLKDNPIYAATQLAKRTLKEEWKKLGDQSLEFLQDSKQWQNINPNTWDKWLKCQWQTYYTAFPIGDPESDLTCSLRVGKNETEEQKKDAFEAWCHQQNQLTNPKESLFETNEEKFLKAIFKLTDIETEKEPPKTKYSKQPNLNVGSWWAYVFDQLRTSLNAVKNARTWELPTAFTVRSSLSGIGSAVHPIVNEEKPDRISEKEINEFWSEKFGLFDGTEKLNATEIVKRVLHKLLPEILNYEEQEISLYYPDLTAGVAGYLKNALLNNQQSEIDYYKRSCHKIYKEIQPLLDNDNLSQSWGIPWINNNKELKLSNTIHHPRLLNAGWLLEDVEISHDSNIEYREKLEELSTKRTTIQQVINKYYPSNNPTNWYILVAGDGDSMRDWLRGSKLKNYGEYLPDELREKIINDSNDEIPKEYKEPLQNFLEVRKRMGPSTHSALSRALLDFSNQLVPYLTEQRYAGRLIYSGGDDVLAYTNLWEWDNWLWDIRQCFKGQEDPYNEFKNEGDYWQWNKPNKPKNIAQRPLFTMGKCATISFGIVIAHHSIPLAIALESLWEAEEEAKEHYTQKDNKDTYKDAVQVRVLYGNGNTLKSTSKFDIFNQWKQLLKLDLEPSLFEQAATIWEQHPIPDKSAIEPWTKAFCSRRDIGEELQQDYQKILTSFIQGLWITTPQNNLDKEVKNWLKLAAFVKRNRKISLNQE

SEQ ID NO: 165 - DNA, 549 bp, Cyanothece sp
atgcaattaatcacccgaaaatttaatgttaatgagtatcacaaaatggcagaaacaggaattttgaccccagaagatagggtggaattaatcaaaggagaaattattgccatgtcacctattggccgaaaacacgctgctactgttaatcgattaaatcagttattgtgccaaaaattttataataaagttattgttagtgtacaaaattctatcagattagataattattctgaaccgcagcctgacattgttctcttaaaacctcgttctgacttttatgaaagtaaaattcctgaacctgaagacatttatctcttaattgaagtggctgacagtaccatcaaatacgatcaagatgtgaaattaccactttatgctgaaagtaagatttctgaagtttggatcgttaatttgaataacaaaactttagaagtatatcgtcaacctcaaaataaaacttatgtagaacaaaagaaaaatgttcaatctatttcacctatagctttccccgaaactacgttaacaattaatgatatttttagttaa

SEQ ID NO: 166 - protein, 182 aa, Cyanothece sp
MQLITRKFNVNEYHKMAETGILTPEDRVELIKGEIIAMSPIGRKHAATVNRLNQLLCQKFYNKVIVSVQNSIRLDNYSEPQPDIVLLKPRSDFYESKIPEPEDIYLLIEVADSTIKYDQDVKLPLYAESKISEVWIVNLNNKTLEVYRQPQNKTYVEQKKNVQSISPIAFPETTLTINDIFS

SEQ ID NO: 167 - DNA, 1191 bp, Cyanothece sp
atgtattggtacaccctaacacccactgacgttttaatgttacgagatgcgaaaccttttagcccccaagaaagggcttgggcaggtagtgtatttcctcctaacggacacaccattgcaggggcattaagaggacttttaggcacaaaagacaatttcaaactaaagggggtcttctttgtcaaagaaacccccagacaggacacaaataacccagagtttaccctttattttcctagtcctttaggcttcgtggggaataagcctcttattcctttaaactgggataaaagtttatctttaaattacattttttgggatcaaactaaaccttgtcctttaaccactaaaaagcccgattatcaagaggataaactagataaaaagtatcgtaaatatttaccttatgaggctattttaaactatctacaagatagcaaatttcaagaaggcgacttattacaattgaatgatgaacctgaaacaccctggaaaatagaaacccgttctcataattccattgaaactaatacaaaacaagttaaagatgctgatggttattttgtagaaaatgctatcagaatgttaccaggatggcatctggcgatcgctattgatcaattaacccatgaaaatattgaaaacctatctaataaatcagaaaaattactaacattacgattaggaggagaaggacatcgagttattttacagcgatgtgaaagtttagatacacaatggaatcaattaaaagaaatatccaataacaactttaaaaatgatcagaaagcgatcgcttatttagttacccctggtgtctttgaaaagcatcataatggacaggcaatatgtaaaccctacccttgggaatggaaacttgcacacaccattaatggtaatcaaaaatccggtgatttagtgagtgttgcaacagctaaagctgtacctattagttgtcgaattagagataaaaatgatcaaaataaaagcattcctgcgcctcaagtgtttgctgtacctccaggcactcagtattacttaaatcaaccttgttatctatttgctgatcctcacaacccagacactcaacacttaaaagaaaatcaagaaaaacaagcttatcacaaagctaaacgtttacttgagttaggttactctgaattattttggattaaatgggagaatcattaa

SEQ ID NO: 168 - protein, 396 aa, Cyanothece sp
MYWYTLTPTDVLMLRDAKPFSPQERAWAGSVFPPNGHTIAGALRGLLGTKDNFKLKGVFFVKETPRQDTNNPEFTLYFPSPLGFVGNKPLIPLNWDKSLSLNYIFWDQTKPCPLTTKKPDYQEDKLDKKYRKYLPYEAILNYLQDSKFQEGDLLQLNDEPETPWKIETRSHNSIETNTKQVKDADGYFVENAIRMLPGWHLAIAIDQLTHENIENLSNKSEKLLTLRLGGEGHRVILQRCESLDTQWNQLKEISNNNFKNDQKAIAYLVTPGVFEKHHNGQAICKPYPWEWKLAHTINGNQKSGDLVSVATAKAVPISCRIRDKNDQNKSIPAPQVFAVPPGTQYYLNQPCYLFADPHNPDTQHLKENQEKQAYHKAKRLLELGYSELFWIKWENH

SEQ ID NO: 169 - DNA, 1305 bp, Cyanothece sp
atgggagaatcattaattatggctagtattgtattatcatttgttggcaatcaagatcctgcgtctgaaactactaatcaagaaggatcaattattaccttaattcgtcatcttatcaagctaaattctaaaataagaaaagttatcttactttatacagaagatacaaaagataatgctattttaactaaagaatggctacaacaagatgattttaaaatttcaacgaatcaaattgaactaatagcagtttctagtaatttatcagatgatcctgttgatgtgaaattagcaactcaagaagctaataaaggcttaaaacaagcaaaaaattatcgtaaagataatgatatttttgagtttaactcatcttctggtacaccttcaatgaaaactgcctggggaattttacaagcttctagttatggaattaatagtagactttggcaagttagaaatcctaagaaaattcagccttctcaagaacttgtttttgagaataatgtgaatgtttttaaagatgaatcgaattttagtgttattaaaaaacagttacaaaattataactatagtggggcaatagaaagtttaaacaatagtgatttagatagtaaaatttcccataatttaatggaatatggttattatcgtttagcatttgattttcaatccgctagagaagttatacaaccttatcaggaagaaattagtcaagaattaatcaaaaatattaacgatttgtataatgaaaatatcctagaattattacaggaagtttactataaaggaattattaaaattaaaaataaacagtatgctgactttttagttttgttattttcgtttcaggaaaacatacttaagtttttagtcaaacagcaaattcttaaagatacttctcaaccgttacattggaaagttgctaaagaaaaaatcaattatcaattacaaaaaggagaactcaatgaatatctaaaaaactattcttatgacgggcgatcgcttaaactaaatggagatattaatcgcattgttatgttagctatcttagactatttttctcagttggataatcacttaagtcaaataactttgctgcttaaacaactagaaaattattgtcaaattagaaatgaattagtacatgatattaaaagagtttctgaactagaaaatgaaagcgaaattatcaaaactatgcgagaaattctcattttaacaaaacctaattttcaaactgtcaacccttttaatttactcaacgaacaaatcgttaaacaattaacaccattagtcagaggttaa

SEQ ID NO: 170 - protein, 434 aa, Cyanothece sp
MGESLIMASIVLSFVGNQDPASETTNQEGSIITLIRHLIKLNSKIRKVILLYTEDTKDNAILTKEWLQQDDFKISTNQIELIAVSSNLSDDPVDVKLATQEANKGLKQAKNYRKDNDIFEFNSSSGTPSMKTAWGILQASSYGINSRLWQVRNPKKIQPSQELVFENNVNVFKDESNFSVIKKQLQNYNYSGAIESLNNSDLDSKISHNLMEYGYYRLAFDFQSAREVIQPYQEEISQELIKNINDLYNENILELLQEVYYKGIIKIKNKQYADFLVLLFSFQENILKFLVKQQILKDTSQPLHWKVAKEKINYQLQKGELNEYLKNYSYDGRSLKLNGDINRIVMLAILDYFSQLDNHLSQITLLLKQLENYCQIRNELVHDIKRVSELENESEIIKTMREILILTKPNFQTVNPFNLLNEQIVKQLTPLVRG

SEQ ID NO: 171 - DNA, 894 bp, Cyanothece sp
atgaaagactttcgcttaaactatttatatagcttatctcctattcattgtggaggagaaggagacttaggtaatatattagaaattgcccgtgaagtccacactaattttccttatattcctggttcttctattcggggaagtatcagaaatgaggtagatattattaactctgatgctactaacaaattgtttggaaaagaactcgatgatgatggaaatatgggcgttcatcaagtatggtttggagatgcaagactcttatgggttcctatgaaaaccatgtcttttaatggtaatcaagacatttttacctgggtgagttgtcattctttaattcgggatcatgctattatttctaacttaccttttgttactttccctaatgaagctgtagggacaaatgcagggacttatgaagtagctgatgctcaaattaaggtattaaaaattacgcctgatcaagaaaaaaccattacttttttaggggagttccctgactctcttaaagactctgttaaacctacttgggaaagtaatcatattgtactccctgatgctgactttcaagtattaatggaacattccttatggacacaggtaagaaataaaatttcggatggtacaaaagaagacactgaagcaggttctgctgaagttttttggacagatgtttgtatcccccgcgatactattttttacttaccttggggttacagtttatctaaaattgatcctatttctaccgatgaacataataaattaatggaagtaattcaaggattaattcaagtcggtggacaagcaaacgtcggacggggatgggtacaaagttgggttagtcattcaacttttgaattcaacaaacaagaacaacaactcacaaatgtttaa

SEQ ID NO: 172 - protein, 297 aa, Cyanothece sp
MKDFRLNYLYSLSPIHCGGEGDLGNILEIAREVHTNFPYIPGSSIRGSIRNEVDIINSDATNKLFGKELDDDGNMGVHQVWFGDARLLWVPMKTMSFNGNQDIFTWVSCHSLIRDHAIISNLPFVTFPNEAVGTNAGTYEVADAQIKVLKITPDQEKTITFLGEFPDSLKDSVKPTWESNHIVLPDADFQVLMEHSLWTQVRNKISDGTKEDTEAGSAEVFWTDVCIPRDTIFYLPWGYSLSKIDPISTDEHNKLMEVIQGLIQVGGQANVGRGWVQSWVSHSTFEFNKQEQQLTNV

SEQ ID NO: 173 - DNA, 36 bp, Halorhodospira halophila
gtccgaacctagccctgttggaaaagggattaagac

SEQ ID NO: 174 - DNA, 963 bp, Halorhodospira halophila
gtgggcaccctctacatcgaccggcgccggacgcgcctggagctcgcgcacaaggcgctcaccattcgggaaccggaggcccagccccgctcggtgccgctgagcctcatcgaccgactgatcgtcattggccaggtcgagctgagcagcggcgtgctcactactctcgccgagagcggcgtcagcctggtcttcatgccgagccgtggacagcggcgcagcgccttcctccgcagcgagggccatggcgatgccgtccgccgcctcggccagtacaggctcatccacctcgaggctgagcgccaggcctgggcgcgccgcctcgtgcgactgcgtctggccgggcagcagcggctcctcgcgagtgcgctataccggcgtcctgatcaacgccagccgctcacggctgcccaccgcgagatcgaggcggcccaggcgaccgtgcgccgcgaggcgcccgccggtgagcaactgcgggggcaggagggtacggccgcggcggccttcttccgcggctacggcgctctcttcgccgaagcgctaggcttctccgggcgaaatcgccggccaccccgggatcccgtcaacgccgtcctctcgctcggctacaccctcgcgcacggcgatgcactgcgggccgtcaccgctgccggcctcgatccggccatcggcgtactgcacgagcctgcctgggggcgagactccttggcctgcgatctcacggagatcgcccgggcccgggtggagcggctgacctgggagctattcgcgagcgagacgctccagcgcacggacttcaccaacagcaccgagggcgtacgactaggcaaggctgcacggcagaccttcttcggctgctgggaacgccatgccgggctccatcgacgctggcagcgccgcgccgctcaggccctagccgccgagtgcgcccaccacggcgcccaaactattcccgaggcgtag

SEQ ID NO: 175 - protein, 320 aa, Halorhodospira halophila
MGTLYIDRRRTRLELAHKALTIREPEAQPRSVPLSLIDRLIVIGQVELSSGVLTTLAESGVSLVFMPSRGQRRSAFLRSEGHGDAVRRLGQYRLIHLEAERQAWARRLVRLRLAGQQRLLASALYRRPDQRQPLTAAHREIEAAQATVRREAPAGEQLRGQEGTAAAAFFRGYGALFAEALGFSGRNRRPPRDPVNAVLSLGYTLAHGDALRAVTAAGLDPAIGVLHEPAWGRDSLACDLTEIARARVERLTWELFASETLQRTDFTNSTEGVRLGKAARQTFFGCWERHAGLHRRWQRRAAQALAAECAHHGAQTIPEA

SEQ ID NO: 176 - DNA, 315 bp, Halorhodospira halophila
atgggtgagcgcgccatcgatcacctggtctgttatgacatccgcaagccggcccgcctgcgccgtgtccatcggctgatgaaggaatggggcgtgccgctgcagtacagcgttttctactgccgcctcgtcccgagcgcccggcatcagctcgccgaggctctgcgccgcgagatcgacgagcgcgtcgacgacgtgcggatctacgccttgcagcctcaaggggagggcacctaccagggtccggcgcccctgccgccaggcctggtgttgccggggttaagcctgagaccgcaattcccggaggccgactag

SEQ ID NO: 177 - protein, 104 aa, Halorhodospira halophila
MGERAIDHLVCYDIRKPARLRRVHRLMKEWGVPLQYSVFYCRLVPSARHQLAEALRREIDERVDDVRIYALQPQGEGTYQGPAPLPPGLVLPGLSLRPQFPEAD

SEQ ID NO: 178 - DNA, 798 bp, Halorhodospira halophila
atgccccgcctcgagccgcgtaccctctacctcaacgccgagcggatccaggtccggtacgagggctcggcgctgcgcctgtgccgccccggcaaggccgcggagtacgtcccgctcgcccgggttagccgtgccgtcgtgcgcggcagcgccggcgaggggctcctccaggcttgcctcgccctggtcgaggcgggtgctgtcgtccactttcaggacggccacggccagcccacggcctgcctgcagccggcccaggagccgcagaatcggcccgtccaggagctgacctcgctgattgagacacagaccgggctcgtcccctaccactggtggcgagacgcccagcgccgccacgcctggagccttgtcttccggcgcggtccccgcggcgatttccagagcgcctgccgacggcttgaggactacctgcgcaagctcagcccgctgcgctggatcccgcacgagatcgcggcgctcggcggggggttgcaaagctggctacaggcggagctgcaccgcagcggctggcgacctgcctgccgcgcgctcgccgcccaaggtgaagacctagaaggcgagctgcgccgttgcctctatatccccctgctcttgcgcttcgtccggtggcgacgccatcagcccccagagcttactgagcgccggcgtgtcgagttccttgagctccagctcgcgcgccccgtgcccagccagcttcatcggcacctgcaggcgctcacggaggaatactacgtcagctggcagcgcatgcgccgggaggagcccgcccatgggtga

SEQ ID NO: 179 - protein, 265 aa, Halorhodospira halophila
MPRLEPRTLYLNAERIQVRYEGSALRLCRPGKAAEYVPLARVSRAVVRGSAGEGLLQACLALVEAGAVVHFQDGHGQPTACLQPAQEPQNRPVQELTSLIETQTGLVPYHWWRDAQRRHAWSLVFRRGPRGDFQSACRRLEDYLRKLSPLRWIPHEIAALGGGLQSWLQAELHRSGWRPACRALAAQGEDLEGELRRCLYIPLLLRFVRWRRHQPPELTERRRVEFLELQLARPVPSQLHRHLQALTEEYYVSWQRMRREEPAHG

SEQ ID NO: 180 - DNA, 282 bp, Halorhodospira halophila
atgcgccgcaaactctacctcgccgcctacgatgttcgctgcccacgccggctatcccgcgccgtaagggtcatcaagggatacgccagcggcggccagaagtcggcctatgagtgctggctgacccccgccgagcacaaggcgctgcacacggaaatggcgcaggtcatcgaccccactgaggaccagttcgcgctcctgccgctggagccgcgccgccccctggtcaccctcggcgctgccgaggtgcccgccgatccagacttcttctacttcggctaa

SEQ ID NO: 181 - protein, 93 aa, Halorhodospira halophila
MRRKLYLAAYDVRCPRRLSRAVRVIKGYASGGQKSAYECWLTPAEHKALHTEMAQVIDPTEDQFALLPLEPRRPLVTLGAAEVPADPDFFYFG

SEQ ID NO: 182 - DNA, 1158 bp, Halorhodospira halophila
atgacccgactccacatccagctggtgtctgcccagcttgccggcaatctgatacccgcgctcatggagcgcccggagcatgcggctctcattgttacgccggccatggccgggcaggctcagttgctccgcaagctggaagaagaggccggtattgcggttcagaccttcgagaatgccccggatgccgacctgccccagttgcacgaattcgccctggggatcttggaagagttgccggcggcggacgaggtggtcctcaatctgacgggcggcaacaagctcatggctctggggtttctcgagatgctgcgggatagtgtacaccgccggatctacaccgataccgcccatggccggttggagcacttgccggaggggaatgaacgggccgaggcgccgacgccacagacctcggtgcttgacgtgccaatcagcctgcgcgcccaggggtttcgctaccaccgtgctgcctccgcggacgaggactggcagcgtgaggctggcgagcgcaagcaggtggccaagaggctagcggaggtcgccagggaccatggcgatttcctgggtgcgctgaatgcggtcgcttcccggtctctggacagggaggggcggctggtcgcgcgtgaccaggccttcgatgacccaccgtacggccgctgggccaataatctgggctggctccgcgaccagggcttgctggactgggagggtggtgccgaggtgaccttcctcgacgaggagcggactcgctttctcaacggcggctggctggaggagtatgtctaccaccggctccgggatgaggggctcgacgatgtggccatgggggtggaaggcacctgggaaggtaccgacaaggcccgcaacgaactagatgtggttgccatccatgtcaatcgtctgttggtggtggagtgcaagaccctgcgccacggcaacgaagccgccgatgaccagcaactctacaagctggacagcatcggcgataacctgcgcggcttcttcggtaccagttggatggtcagcgcccggcagccgacggatattatgcgagagcgcgcccggcagcatcggatccgactcattggcccggatgagctgccccggctgcgggatatcgtccgggagtggaaggcgcacgtggagccctgctga

SEQ ID NO: 183 - protein, 385 aa, Halorhodospira halophila
MTRLHIQLVSAQLAGNLIPALMERPEHAALIVTPAMAGQAQLLRKLEEEAGIAVQTFENAPDADLPQLHEFALGILEELPAADEVVLNLTGGNKLMALGFLEMLRDSVHRRIYTDTAHGRLEHLPEGNERAEAPTPQTSVLDVPISLRAQGFRYHRAASADEDWQREAGERKQVAKRLAEVARDHGDFLGALNAVASRSLDREGRLVARDQAFDDPPYGRWANNLGWLRDQGLLDWEGGAEVTFLDEERTRFLNGGWLEEYVYHRLRDEGLDDVAMGVEGTWEGTDKARNELDVVAIHVNRLLVVECKTLRHGNEAADDQQLYKLDSIGDNLRGFFGTSWMVSARQPTDIMRERARQHRIRLIGPDELPRLRDIVREWKAHVEPC

SEQ ID NO: 184 - DNA, 312 bp, Halorhodospira halophila
atgacgacttggttcgtgacccgtcactcgggggctgtggaatgggcccagcgccggggcctggcggttgatcggcaggtggatcatctaaatccggccgagctggaggttggggatagggtgatcggaacgctccccgtgcatcttgcggccgctgtatgcgagcgtggtgggcggtatctccatctgtcgctggatctcccaccgcagttgcgcggccaagaactaaccgccgacgacatggaggccgctggcgcccgtctcgaggcctaccgtgtagagagcctgggcgaagtggaaccgggcaactga

SEQ ID NO: 185 - protein, 103 aa, Halorhodospira halophila
MTTWFVTRHSGAVEWAQRRGLAVDRQVDHLNPAELEVGDRVIGTLPVHLAAAVCERGGRYLHLSLDLPPQLRGQELTADDMEAAGARLEAYRVESLGEVEPGN

SEQ ID NO: 186 - DNA, 1134 bp, Halorhodospira halophila
atgaccgccgacaccgacgcgcctcataccctcctctgcgtcaccgggctgacgccacaggtggtcaccgagacgctctacgccctcgcgcaggagggggcacacgcccttccggatcgcatcgaggtcatcaccacgaccgagggccggcgccgcctggcgttgaccctgctcgccgagcacggcggccacggctacctggaccgactttgcgccgactacggtatcgaccgcggcgccctcgccttcgacgtggacagtatccacgttgtcggcggcgccgacgacgagcccctcgccgatatcgtcactgaggcggacaacgccgcggccgccgaccggatccacgagcgcatccgcaccctgaccgagcagcccgggcggctgcacgtctccctcgccgggggacgcaagaccatgggcttctacgccggttactcgctctcgctctacggccgggggcacgaccggctcagccacgtgctggtcaatccgcccttcgagtcgcacccggacttcttctacccaccaccgacgccggcaaccctccagctacccgggcgcaacgacatcatcagcaccgccgaggccgaggtgcgtctcgccgaactgcctttcgtccggctgcgcgaggagctcggcgaggagctgccgcatcaggggctatccttcagcgaggcggtcgagcgcgcccagcaggtactgatcccgccccaattgaccatcgatcttactgagcgcaccgtcacgctccaggggcagccgatcaccctctcggcaacccacttcctctggctgacctggctggccgaccgcgctcggcaagaggccccagcgatcgccttcgacgaggccgcggttgatgaactgacgggctacgccgactggcttgaaggtcgcctctcacagctgcatgagagcctggcctcggcgcgcaaggagatcgagcgagaaggccgctcgaactacttcgagcgcacccgctcgcgactcaacaaggccatcgccgagcgcagcggcctgcccacccgggcggcagcgcgctaccagatccacacccacagcagccggccccagaccacctacggcctgaagctcgagccggagcagattcgtatcgagggggagccgtga

SEQ ID NO: 187 - protein, 377 aa, Halorhodospira halophila
MTADTDAPHTLLCVTGLTPQVVTETLYALAQEGAHALPDRIEVITTTEGRRRLALTLLAEHGGHGYLDRLCADYGIDRGALAFDVDSIHVVGGADDEPLADIVTEADNAAAADRIHERIRTLTEQPGRLHVSLAGGRKTMGFYAGYSLSLYGRGHDRLSHVLVNPPFESHPDFFYPPPTPATLQLPGRNDIISTAEAEVRLAELPFVRLREELGEELPHQGLSFSEAVERAQQVLIPPQLTIDLTERTVTLQGQPITLSATHFLWLTWLADRARQEAPAIAFDEAAVDELTGYADWLEGRLSQLHESLASARKEIEREGRSNYFERTRSRLNKAIAERSGLPTRAAARYQIHTHSSRPQTTYGLKLEPEQIRIEGEP

SEQ ID NO: 188 - DNA, 1071 bp, Halorhodospira halophila
gtgagccggcaagcttgcaggcatgctgaccacgttgatcgccgggcgatactgcggccacgcaagagagcgaagagcaccatggagcaacgacacctgaccctggagctgctgaccccgacctttctcggggatgctcagcagaccgccgcctggcggacgccgccaatcaaggcgcagctgcgccgctggtggcgggtcgccgcgttcgcgcaggggatgcgcctacccgagctacgcgccctggaaggacggcttttcggcgacgccgccgggcagcagggccgcaagagccaggttcggctgcgcctacagccgcataagggacggccgggcacgcagcacaacaacgcgtggcgccagcaagccaatcaacagccgttacggatgaataacggcttgccggccgatggctacctcggtttcggccgggtcaagaccaaaggtgctaacgagaccgccctgccacccgaggagaaggccgagctgcgcctggcctggccggcggaagccgagggcgccgaggccctcgacgaggccctcgggctcttccatcggctcggcagcctcggaggacgcagccgcaacggctggggcgcctgccacctgcacggcgccgaggccattggcctggacgcctacagccgtccctgggaagaggccttggaagaggcctggatccacgccctcggcagggatggaaacggcctgctgctgtggtggaccccgccgtgcaagagctgggaggccgccatgcgacggctcggcgacctgcgcaagggcctgtgcggcgaggcgggggcgctgcggccgctgctctcctggccggtcacaggccagcagcagcagggtctcgacaaccagaaccggatccccaacaccctgcagcttaaggttgtccgggacgagcaggggcagctgcggggacaactcgcgcacctcccctgccgacccgagccgaagatctgggatgcgctacccaaggaggtgcgcgacgaccatcctgcgctctggcgcaacgcccacgccttcctcgaccggcacagcgatctcgagcgggtgcacgcatga

SEQ ID NO: 189 - protein, 356 aa, Halorhodospira halophila
MSRQACRHADHVDRRAILRPRKRAKSTMEQRHLTLELLTPTFLGDAQQTAAWRTPPIKAQLRRWWRVAAFAQGMRLPELRALEGRLFGDAAGQQGRKSQVRLRLQPHKGRPGTQHNNAWRQQANQQPLRMNNGLPADGYLGFGRVKTKGANETALPPEEKAELRLAWPAEAEGAEALDEALGLFHRLGSLGGRSRNGWGACHLHGAEAIGLDAYSRPWEEALEEAWIHALGRDGNGLLLWWTPPCKSWEAAMRRLGDLRKGLCGEAGALRPLLSWPVTGQQQQGLDNQNRIPNTLQLKVVRDEQGQLRGQLAHLPCRPEPKIWDALPKEVRDDHPALWRNAHAFLDRHSDLERVHA

SEQ ID NO: 190 - DNA, 2934 bp, Halorhodospira halophila
atgacggaggcaaccctcatggacattgatctggcccggaacaagctgctcgcccgactgcacgacccggcggagaaggcgctggtcctgctgcgcgatcccgccggccacgaggggggcaccgtgcgcaccctcatcgaggagatcctcggcgaggtgccgcaggcggcctgggcgcccgtgcgcaaggccgaccgctgggcctcggcggcggaccggccgcaattcccccgtgagcgcgacggcgatcgcttcgcgcgctggagccaggtgcgcttcgccgagcagccggtgctgcgccatccgctcaccggcgagaagatcgatctcggcgagcacggcaagctgcgggagatcgagctcgacacgctcaaggccggcagcctcgagcatttccggcacctgatccatcgtgacgaggcggggagcgtcgattcctggcggaccctgctcgcgctgtggcgcttcggccccgagccggcaacgagcggcgatgcgaccgggctcggcgagctgtggcgctatctgccggcggatacccgcatcccggaccacaccatctggcagcacctggacctgagctccgcgctcaccggcgccttcgcgggcgatggccagggccgctgcgccctgctcaacgtcaccctcggcccggtgcaggagctgatcgccgccgcccggacgacctcggacctatgggccggctcgcacctgctcgcccggctcgcctgggaggcgatgcgcgtcgtctgcgagcgcctcggccccgacgccgtgctcttcccgcagctgcgcggcgtcccgcaggtcgacctctggctcctcgagcaggggctggcgccggagctcttcgcgaaggagccctggaacgagcgcaccgtcaccgacgccaacccgctgttcagcgccgccctgcccaaccgcttcctcgccgtggtcccggcggatcaggcggaggcgatcggccgcgccatcgaggcgcacctgcacgagtgggtcgccgagaccgccgagggcgtggtcagcgatctgctcagggccgtcaacctgcacaccgatccgacaacacccgcctatcagcaggcacgggagcagctggccggattccctgaggtctactggtcggccgtgggctgggacgagatcgccacggacgccaacggcgagcccgaggcggaccgcctcgccgaggccctgcgccccttctatgagccgcaggccgaggcccccggcttcctcagctccgaggcctggcgcgtactacagcggcccatcgaggtcatcgatccggaagcggggacgccggcgaccttctaccggcccaatcccggcgtgctctaccccgcgctctacgagctcagcgagcgagtgatgggcggcgtcaaggcgacccgccccttcgccgcgcagcacgagggcggctatcgctgctcgctgaccggcgaggtggagtggctgacccacgatcgcagccacctcgacctgccgccgggccagcgggaagggcacgacaccctctggagcctcgttgccaagcgccacccgagctgggcgcgcaagggtgagcacctcggggcgctggccgccctcaagcggctctggccgcagcgcttctgccgcgaactcgccgggaccctcgggcaggagcagacgccgcgcttcgtcgtctccacgcacaccatggcgctggccacctccctggcccgcgctgccgaggagccgaatcccgccggcgggctcagcgccgagcaggccgaggcgatccgcaacgccgatcgggttgcgctaccgcggcggctggcgcagcggctacaccacctcgagcacggtgagctcctcgcccggttgcccggctgggtcgagcagcagcgcgaatccgacgacggcgatgagaccgccgcccggcaggcgatccgcaaggtcaccggcaccgaggccgaggcctactacgccctgctgctcatggacggcgaccgcatgggggcctggctctccggcggcgacgggacgaccatcccctaccgggcggccttccaccccgacctggcggacgcagtggacacacgcttcggcgaccatacggtcctgcaggcgtacctcgacacgccgcgggcggtctcaccggcccggcacctggccatctccggggcgctgaacgacttctccaccaccctcgcccgcagggtggtcgaggagtgtcaccacggccgcgtcctctatgccggcggcgacgacctcatggccatgctgcccactggcgatctgctcagcgccatgcgcgagctgcgcgacgcttactcgggcacggctaccagcggtgaggccgaggaagaggacgcctggtgccgcaacggcttcatctatcggcaggaccggctgtacctgaccatggggtcgcaggccaccgcctcgatgggggcggtgatcgcccaccataagacccctctgaccgcggccctcgctgaactgcgccaggccgagcagcgggccaagaacgagggcgggcgcgacgccttcgccctgtccgttctcaagcgcagcggcggcgccctgcgccacgtcggccgctgggcaccagcagcgggtatcgacgagatgagcgccctgcgcgacttcgccgaggcgctccatgccaaccccgaggcctcccggcgcgccgcctacaacgtcgcgggctggctcgccgatctccccgagcccgacaccctccccccggaggacggcgtcgccggctacctcgaggcggtgctgcactaccaattctgccgccagggcctcgagcagcaggggcagcccatccacgcgcggcggctcggatcgctcgccagcgtctcgccaaccggcgacgagctgagcagcgccgccaagatccgcgaccgtctcagccacctcgtcggcgtggccgagttcctcgcccgcgagacccggaggtag

SEQ ID NO: 191 - protein, 977 aa, Halorhodospira halophila
MTEATLMDIDLARNKLLARLHDPAEKALVLLRDPAGHEGGTVRTLIEEILGEVPQAAWAPVRKADRWASAADRPQFPRERDGDRFARWSQVRFAEQPVLRHPLTGEKIDLGEHGKLREIELDTLKAGSLEHFRHLIHRDEAGSVDSWRTLLALWRFGPEPATSGDATGLGELWRYLPADTRIPDHTIWQHLDLSSALTGAFAGDGQGRCALLNVTLGPVQELIAAARTTSDLWAGSHLLARLAWEAMRVVCERLGPDAVLFPQLRGVPQVDLWLLEQGLAPELFAKEPWNERTVTDANPLFSAALPNRFLAVVPADQAEAIGRAIEAHLHEWVAETAEGVVSDLLRAVNLHTDPTTPAYQQAREQLAGFPEVYWSAVGWDEIATDANGEPEADRLAEALRPFYEPQAEAPGFLSSEAWRVLQRPIEVIDPEAGTPATFYRPNPGVLYPALYELSERVMGGVKATRPFAAQHEGGYRCSLTGEVEWLTHDRSHLDLPPGQREGHDTLWSLVAKRHPSWARKGEHLGALAALKRLWPQRFCRELAGTLGQEQTPRFVVSTHTMALATSLARAAEEPNPAGGLSAEQAEAIRNADRVALPRRLAQRLHHLEHGELLARLPGWVEQQRESDDGDETAARQAIRKVTGTEAEAYYALLLMDGDRMGAWLSGGDGTTIPYRAAFHPDLADAVDTRFGDHTVLQAYLDTPRAVSPARHLAISGALNDFSTTLARRVVEECHHGRVLYAGGDDLMAMLPTGDLLSAMRELRDAYSGTATSGEAEEEDAWCRNGFIYRQDRLYLTMGSQATASMGAVIAHHKTPLTAALAELRQAEQRAKNEGGRDAFALSVLKRSGGALRHVGRWAPAAGIDEMSALRDFAEALHANPEASRRAAYNVAGWLADLPEPDTLPPEDGVAGYLEAVLHYQFCRQGLEQQGQPIHARRLGSLASVSPTGDELSSAAKIRDRLSHLVGVAEFLARETRR

SEQ ID NO: 192 - DNA, 1152 bp, Halorhodospira halophila
atggccgagtaccgctacatcgagccccaggacgtcctcttcttccgcggcaaccgcctctttggcgagcccggcaacgccggcgccgccctcatgccgccctggccctcggtcttcgccggggccctgcgcagcgccatgctcagcgccgccggcgcggacccggcgcagctgcgcagcggcgagctgcctgccccgctcgacacggtgctcggcacccccgaggagccggggaccttcaccctcaccggcgtgacgctggctcgccggcagtcgtccggcaccgccgagcccctccaccccctgccggcggacctgagcgtcgagcgtgatgaggccacaggcgagtgcgcggtccatcgcctgacgccgcagccactgcccgccggcgtcgccagcagccaacccctggagcgcctgccggtgctccggcgcagcgaccgcggtaagccggccgccggctactggctcacccatagcggctggcagcgctactgccagggcgagcccccaccggctgaggccctcgttcaccgctcggcgatctggagcagcgacccgcgcctgggcattgccctgaagcccgagcagcgcacggcggccgagagccagctctacaccaccgagggcatccggctgtgcgagggatacggctttctcgccgccatcgccggctccgacccgaccagcctgcctaagcaggcaaccctgcgcctcggcggcgacggccgcggcgcgttcatgagcgccgtcgcagccccggtcgaaacctcgccggagccggccgccatcgaggcagagggccgcctacggatcgtactcaccacgcccggcatcttcccgggggggtggcaactccccgggctcgacgccaatggcctctggcactatcccggcggccgggcgcggctggtcgccgctgctgtgccccgcggccaggtcatcagcggctgggatctggctcaccaccggcccaaacccgcccaacgtgcggccccagccgggaccgtctactggctcgaggcgcttgagggcgggctcaagccgcttcgcaagcttgccgaatccggtctctggggcatgaccccggagaatgaagacccagcacggcgagccgagggcttcaaccgcttcgccatcgccaacgcctga

SEQ ID NO: 193 - protein, 383 aa, Halorhodospira halophila
MAEYRYIEPQDVLFFRGNRLFGEPGNAGAALMPPWPSVFAGALRSAMLSAAGADPAQLRSGELPAPLDTVLGTPEEPGTFTLTGVTLARRQSSGTAEPLHPLPADLSVERDEATGECAVHRLTPQPLPAGVASSQPLERLPVLRRSDRGKPAAGYWLTHSGWQRYCQGEPPPAEALVHRSAIWSSDPRLGIALKPEQRTAAESQLYTTEGIRLCEGYGFLAAIAGSDPTSLPKQATLRLGGDGRGAFMSAVAAPVETSPEPAAIEAEGRLRIVLTTPGIFPGGWQLPGLDANGLWHYPGGRARLVAAAVPRGQVISGWDLAHHRPKPAQRAAPAGTVYWLEALEGGLKPLRKLAESGLWGMTPENEDPARRAEGFNRFAIANA

SEQ ID NO: 194 - DNA, 915 bp, Halorhodospira halophila
atgttcgagaagaacgccgccctattcctctacagcgtcagccccgtccacatgggggctggcaccgcgaccggggtgatcgacaaccccatccagcgcgaggtgcacacgcaacacccgagcttcgccggctccgggctcaagggcgccatccgccacggcttcaaggcccttggcggcaaccccgaccaggccgatcagctcttcggcccccgccagggcgatctccacgccggcgccgtgagcctcggggacgcacagctcgtcgccctgccggtgcgcacccgccgggaaggctacgcctacgccacctcgccattggccctcgcccggctgcagcggctgctccaccaggccggcctccagcccgagtggacagtgcccacgctgccccagggcgaggcggctcgcgcgccggcggccgtcacgcccgaggggctcgaggccctcaccgccgacggcggccggctccacttggaggtcttcgagctcgccgcacaggccgaacccggcgtagccgccatcgggcagtggctcgccgagcacgccctcagcaaggaccacggcgagtacttccggaacaagctcgcgcgggacctagtgatcctcccggagaccgagctcaactacttcagccgcaacgccatggtggtcgagccccacgtgcgcatcgatccgaaaaccggcaccgccgatggcagtgggctgttttataccgagaacctgccgccggagagcctgctcgccgcgccggtgatggccagcggcgaccgcagcggtgagcgggagctcgacagtgccgctgtcatggcgcagctccataccgccctcgacggcaacacgctgcagatcggcggcgacgccaccaccggccgggggctggtcacggcccgactcgtggagaaggtatcatga

SEQ ID NO: 195 - protein, 304 aa, Halorhodospira halophila
MFEKNAALFLYSVSPVHMGAGTATGVIDNPIQREVHTQHPSFAGSGLKGAIRHGFKALGGNPDQADQLFGPRQGDLHAGAVSLGDAQLVALPVRTRREGYAYATSPLALARLQRLLHQAGLQPEWTVPTLPQGEAARAPAAVTPEGLEALTADGGRLHLEVFELAAQAEPGVAAIGQWLAEHALSKDHGEYFRNKLARDLVILPETELNYFSRNAMVVEPHVRIDPKTGTADGSGLFYTENLPPESLLAAPVMASGDRSGERELDSAAVMAQLHTALDGNTLQIGGDATTGRGLVTARLVEKVS

SEQ ID NO: 196 - DNA, 390 bp, Halorhodospira halophila
atgacaacgcccatgaccctcgagcagcagcgcgccgccgatgcctggcaggctgcggcggcctgcacggacccctacgccaagctcgccaagggggcgccggcgctaattatgaacagcggtctgatgcagaccctggctttccttgaagacaagggcgaggaccaccaccgagccctcgctcgacagctgcggcggtggattgtgcggcagcacccggagctgctaagcacccgcggcgatagcgcggacccgggctatgaggcaatcatggaggcgctgctccacgccgagccgcgcaccttccaggccgtgaccgcggaggccctcgcctggctgcgctgggtccgccagatcgcgcccactcgcgtcgaggagcgttcgtcatga

SEQ ID NO: 197 - protein, 129 aa, Halorhodospira halophila
MTTPMTLEQQRAADAWQAAAACTDPYAKLAKGAPALIMNSGLMQTLAFLEDKGEDHHRALARQLRRWIVRQHPELLSTRGDSADPGYEAIMEALLHAEPRTFQAVTAEALAWLRWVRQIAPTRVEERSS

SEQ ID NO: 198 - DNA, 1212 bp, Halorhodospira halophila
atgagccgcgccgccgttcccgcctacctcggtgaggacttccgggaggccgctccgggccaccgctttgcgctctatctcagcgtctgggatcagcaatggaagaagcagcggggcggtgcgatcgaggagctgctgaagctgaacgacgacgatcggaagcggctgggcgctttgatcgagcgccaacgccggctactccagcatgaggagagcgcacaaccagggagcaccctgaacctgccggccacgagcacgagccccttcacaacagggctcggcatggcccacccgctggagaacggcttcgcttttctcaccccctacggcctgccttacctcgcgggaagcggcgtcaagggtgtcctgcgccaggcggcgcgggagctcgccgaggggggtgagttcgaggatcccgggcgcgattgggactggcccgagatcgaggcacttttcgggagccccggcgaggacgaaggcggcgtgacaggccggcgccgaggcgccctaaacttctgggacgtcttccccgaaccagggcgagggcaagacctggcctgggaggtcatgacaccccatcagggcagctactaccaggacgctaccggccaaaccgcaccgcacgataacggcgcgcccgtgccgatctacttcctcggtatcccggccggcagcggtttccgctttcatatccagtgcaatcgggccctgttacggcagacgggaccgacactgcttgagccagcgggcgaggacggcgatcgagcacgctggcaggttctgctcgaaaccctcttcgcgcacgccttcgagtggctcggcttcggcgccaagacggcggtcggctacggcgcgctgtccatcgacgagaagacccggcggcacgaggccgaggcgcgcgaaaagatccgggccgaacaggcacgcaaggaacagcttgcgagcttgccgcccgggcagcgtcgcgcggaagagctgcttgagcagcgccaagaccccagctatccggcgcaccgcttcttgctcgaacagctcgaagccggtgcagtagccgccgaggagcaagcggccctggcgcaggttgcgctcgactacctcgcgcaagaccgtgaaaaggttcgtaagacgaagaaagccaagcagaagctgccgaaactggacgaggaagaggtgcaacttcagcgcttcgtcgacgaggaaggcacagggtga

SEQ ID NO: 199 - protein, 403 aa, Halorhodospira halophila
MSRAAVPAYLGEDFREAAPGHRFALYLSVWDQQWKKQRGGAIEELLKLNDDDRKRLGALIERQRRLLQHEESAQPGSTLNLPATSTSPFTTGLGMAHPLENGFAFLTPYGLPYLAGSGVKGVLRQAARELAEGGEFEDPGRDWDWPEIEALFGSPGEDEGGVTGRRRGALNFWDVFPEPGRGQDLAWEVMTPHQGSYYQDATGQTAPHDNGAPVPIYFLGIPAGSGFRFHIQCNRALLRQTGPTLLEPAGEDGDRARWQVLLETLFAHAFEWLGFGAKTAVGYGALSIDEKTRRHEAEAREKIRAEQARKEQLASLPPGQRRAEELLEQRQDPSYPAHRFLLEQLEAGAVAAEEQAALAQVALDYLAQDREKVRKTKKAKQKLPKLDEEEVQLQRFVDEEGTG

SEQ ID NO: 200 - DNA, 915 bp, Halorhodospira halophila
gtgattcgactccatccgctgcagctgaccttcgaggcgcaggatgcgctggtgctgccggcgcagccggggaccttgtggcgtagcgccatcggggcgcggctgcgagccgacgcctgcatcaccggcgcctcgcagtgccgcgggtgccgggtcgccgagcgctgcgcctacgcgcagctcttcgagccgccgcgccggcatgccggcctcgccccgcgctttcgcgatccacctcgcccctgggtgatcgcccctggccccggcgggcagcgggtggcccccggcgagcacctcgagctcggtctcaccctcatggccgatggcctggcgtactggccctccctctatcgagcccttcagcggctgcggctcgggcctgccccgctgaggctggttcgtgccgtcagccacccgccccagggcgagccggccccggcgccagccaagccgctgccgggctatcggcccgagccgcccgcgccgccgccggagggctcagtccagatcaccctcgacagcccccttcggttgcagcgcaacggccgcccgctcacagccgaggcattttcccccgaaccgctgatcgccgcgctattgcgccggatcacgagcctcgatgaaacggcgcccgaggtcgaccatggtgcgctaacccgtcatgcgcaagaggccgtggccctgcgtgatccggtgttgcgctggtacgacgccgatcgatcctcgagccgccagggccggcgcgtaccgctcggcgggttggtcgggcacttccgtcttgaaggcgcgctcgcccccatctggccgtggctttggacagggcagtgggttcatgccgggaaaagcgccgtcatgggccttgggcggtttcgcttggtcgaaagtgaggagcgaggcggtgtacttgggatctag

SEQ ID NO: 201 - protein, 304 aa, Halorhodospira halophila
MIRLHPLQLTFEAQDALVLPAQPGTLWRSAIGARLRADACITGASQCRGCRVAERCAYAQLFEPPRRHAGLAPRFRDPPRPWVIAPGPGGQRVAPGEHLELGLTLMADGLAYWPSLYRALQRLRLGPAPLRLVRAVSHPPQGEPAPAPAKPLPGYRPEPPAPPPEGSVQITLDSPLRLQRNGRPLTAEAFSPEPLIAALLRRITSLDETAPEVDHGALTRHAQEAVALRDPVLRWYDADRSSSRQGRRVPLGGLVGHFRLEGALAPIWPWLWTGQWVHAGKSAVMGLGRFRLVESEERGGVLGI

SEQ ID NO: 202 - DNA, 879 bp, Halorhodospira halophila
atgaaaagggtacccggagatcttgggcgtgagctgattcgcacctgccgccgactgggatttcgaaccggcaaggcgctggtcgttgttctgcttgtgctgctatccatcgacaccctgtcgagtgggctcttgcggctcctggaagatggggggggctttctcgccgaccagtggggatacacggcggcccttatcgctgcggtactggtattaatcggggtttggatctatctgatttaccatgaaatcccgccgtctatgcacgcgaccgacgaggagaacccgcaaccgcgccgggtactgatccttctgttgagcgctcacccgaaccctaacaacttggtcaacgacctcgcgaaggggggagtgcgtccgttgaatagctctacggacctcgggctggtgaacgatgcgctgagcaactggaggatgcctctggaggccatccgcgcccacttgcccaagctcgagcgcgtcgtggtcatctactcctccgggacccatggatcgtgcaagcagtttccggtatttcggcagctcgtcgaaagcctccttgacggggcggatcggcaggtgacggtcgagggtctggatacgcactcaaccgaaatggcacacggctgcgattttgaggacgtcagcgcggtctggcgggcgatcgaatcggtctggaacggtctgatcaaaacacgggggctccggctacgggagagagatgttcttgtggacatcaccggggggaccaagaaggcctcggtggctgctgccttattcacgcaggctcaagggcggcgctgccagtatgtgcgcgtcgacaaggccgttggtgctcgcatcagcgtgatcgatatcgaatacgatcacgaagaccgttaa

SEQ ID NO: 203 - protein, 292 aa, Halorhodospira halophila
MKRVPGDLGRELIRTCRRLGFRTGKALVVVLLVLLSIDTLSSGLLRLLEDGGGFLADQWGYTAALIAAVLVLIGVWIYLIYHEIPPSMHATDEENPQPRRVLILLLSAHPNPNNLVNDLAKGGVRPLNSSTDLGLVNDALSNWRMPLEAIRAHLPKLERVVVIYSSGTHGSCKQFPVFRQLVESLLDGADRQVTVEGLDTHSTEMAHGCDFEDVSAVWRAIESVWNGLIKTRGLRLRERDVLVDITGGTKKASVAAALFTQAQGRRCQYVRVDKAVGARISVIDIEYDHEDR

SEQ ID NO: 204 - DNA, 303 bp, Halorhodospira halophila
atgacagtatggttcgtatcccgtcatcccggggctacagagtgggctaagcggcagggattcgatgtcgatcggcaggtcgagcacctggatgtcgagcaggtcgcagccggcgatacagtgatcggtacactccccgtgcaccttgccgaaggggtctgttgccgtggcgcgtggtattgccacttgattctggatatccctccggagcgccggggccgagagctcagtgccgatgagatggacggcatggatgcccgactcgcgtattatcacgtgcagcaggtcaaggctgacagatga

SEQ ID NO: 205 - protein, 100 aa, Halorhodospira halophila
MTVWFVSRHPGATEWAKRQGFDVDRQVEHLDVEQVAAGDTVIGTLPVHLAEGVCCRGAWYCHLILDIPPERRGRELSADEMDGMDARLAYYHVQQVKADR

SEQ ID NO: 206 - DNA, 23 bp, Herpetosiphon aurantiacus
gcaactccaaccaacaccccaac

SEQ ID NO: 207 - DNA, 996 bp, Herpetosiphon aurantiacus
atgcgtagaacagcactagcccagatcaaacctgccccaaatacccacgcgggcttatggctcaatcgatttttaaccgaaggcagcgctgatgatgagagcaaagccaaagctagcttggttgaacaagtggcaggcctacaaataccagccctgtatacacatttttataatcgttgggcagcgaaccttgagcaggctggagcaacttttcgcaaggccgaagttcaagggcgcatgattgtcggtttaggtaataccagcccaatcgaaacctcgatttgcttgcatcatacctatggtgtgccctatattccaggcagcgcgatcaaaggcttggtagctgcctatgcacggcaacagcttggcgacgattggactaaaggttcagaaacccaagctgaaaagccgttgaatgcctaccaaacgatgtttgggcatcctgaaagcgctggctatctgaccttctttgatgccttgtatattcccaatagcagccaaccgctcgcgattgatgtgatgactccgcatcatatgacctatcagcaaggcaatttacaagcgcccaccgacttcgattcgcccaatccggtggccttcctgagtgcaacaggcagctatttatttgccatcggtggcgatcaagcgtgggtcacagcagcgtttgcaattctggaaaaagccttgctggaatatggtgttggagctaaaacctctagtggttatggtcgattgaagttggcctcaccaccacgcgaccccaaacaagatgccttagagcaatttttggctgattttaaccgtttgcgtcccaatcaatttgtcagccaaattagccgctatattcaacaatgggaagaattacaaggtattccccagaaacttgaggctgccgaaaccatcattaaaatggcacgggttgtcatgcgcgaaaaggatctactgaccaaacaatggtttaccaaagtaagcgaatttattgagcaacattcctag

SEQ ID NO: 208 - protein, 331 aa, Herpetosiphon aurantiacus
MRRTALAQIKPAPNTHAGLWLNRFLTEGSADDESKAKASLVEQVAGLQIPALYTHFYNRWAANLEQAGATFRKAEVQGRMIVGLGNTSPIETSICLHHTYGVPYIPGSAIKGLVAAYARQQLGDDWTKGSETQAEKPLNAYQTMFGHPESAGYLTFFDALYIPNSSQPLAIDVMTPHHMTYQQGNLQAPTDFDSPNPVAFLSATGSYLFAIGGDQAWVTAAFAILEKALLEYGVGAKTSSGYGRLKLASPPRDPKQDALEQFLADFNRLRPNQFVSQISRYIQQWEELQGIPQKLEAAETIIKMARVVMREKDLLTKQWFTKVSEFIEQHS

SEQ ID NO: 209 - DNA, 411 bp, Herpetosiphon aurantiacus
atgtcaatgagccaacgtcaaacccttgagcaacgttatgcaaccaaggtttatgccaaggccaacgcctatagcggtgaatcaaaagatatacgcacacgctatggaaatttagcatttaccttaccaatcatgattcggagtgctgggcttgtccaagcattgcattttgccagcacccgcaaaaaagccgaacaaaaacagtttcttgaagatttggccgatgttttaggctaccaaaatacccaagaattacttgaccagagccgcactgcccaaatcaccgaatatatgcgcttgacgcggcaaacactagcagtgttggtttggttcaaacgctttgcccaatcgatccttgatttggaggcgagtgaggccacagagtcagatagcggggaaaataatgcgtag

SEQ ID NO: 210 - protein, 136 aa, Herpetosiphon aurantiacus
MSMSQRQTLEQRYATKVYAKANAYSGESKDIRTRYGNLAFTLPIMIRSAGLVQALHFASTRKKAEQKQFLEDLADVLGYQNTQELLDQSRTAQITEYMRLTRQTLAVLVWFKRFAQSILDLEASEATESDSGENNA

SEQ ID NO: 211 - DNA, 837 bp, Herpetosiphon aurantiacus
atgcaaactcatgtgatttttgtgcatgcactttcgccaattcatgcgggcactggtcaaagcgtcgatgtgattgacttgccaattgcccgtgaaaaagccaccaatctgccttatatcccaggttcatcaatcaaaggcgtgattcgcgatgtttcaccagcctcagaaagccttaaaaagcagctgtttggggatgttgagcaagctggcgatgcaatttttgctgatcagcgcttgctacttttgccaattcgcagtttgtatggcacgtttgcttgggtaacctcgccgtatgtactcagccgatttgcccgtgaggcccaaaccagcaatctttggctgccagaaattaaacgcagtgagctagccttaattagccaaaatagcgtattaagctaccaacaaaaagtctatcttgaagatcttgaccttgaagcaacaccaggagctgatgcttgggctggctggctggctaagcaattgtttcctgataaacccgattggcaaacgattcttcaagaacgactatgtattgtacccgatgagatttttaatttcttggtgaccaccgcaaccgaaattaccgctcgcattcggcttgatgacaataccaaggttgtaaccaaaggcgggctttggtatgaagaagccctacctgctgaaacaattttggccggaattgtcgcgatcaacgaccaaaaacgcagtgccaatcgcgatcaagtcataactgcaattatcgaagtagccaatcagggaatcatccaattaggtgggaatgcaacagttggctgtggtttatgtcaacttactatagcgcaaggagatcgctaa

SEQ ID NO: 212 - protein, 278 aa, Herpetosiphon aurantiacus
MQTHVIFVHALSPIHAGTGQSVDVIDLPIAREKATNLPYIPGSSIKGVIRDVSPASESLKKQLFGDVEQAGDAIFADQRLLLLPIRSLYGTFAWVTSPYVLSRFAREAQTSNLWLPEIKRSELALISQNSVLSYQQKVYLEDLDLEATPGADAWAGWLAKQLFPDKPDWQTILQERLCIVPDEIFNFLVTTATEITARIRLDDNTKVVTKGGLWYEEALPAETILAGIVAINDQKRSANRDQVITAIIEVANQGIIQLGGNATVGCGLCQLTIAQGDR

SEQ ID NO: 213 - DNA, 1320 bp, Herpetosiphon aurantiacus
atgatgtttaatcgtaaaccctcagctgaatcttcagttaactgtccagatgtaaaaaaaattgaaaatcacaagcctccaattgaacccatcatccgcaattatcgtttaattacgcctttgatgggtggcggggttaaggcgggtgaaaatgattccaattttctgattcgcccaagtagtattcgcggccaactacgtttttggtggcgagcctgttttggcggtagtcatcagcctcaatcgcatgatgcattattagcagatatgtttgcccgtgagtcggcactctttggcaaggctgccgatagtcaatcaagcggcgcatcagcagtccaggttgagatagaggtaatcaatagtggcagccaattccgagtaatcgccaaaaatgggcaagaagtcaaaatttcggccatgaactcgccctacggctattccgcctttcccttgcaagataagcaaaatgccagtgtgcgcgaaggcattgaatttaaattaacgattcacttaaaatctgccgaacaacgtgaagaattggaaaaagtgttgtgggcttggcaaacctttggcggcattggggcacgtacccgacgtggttttggggtgttgcaagcgcttgacaaagccaatcatcgctttgcatttgccaataaagccgaattacaacaacacatcagggcgattattggcaaccgtagctattggccaaatggggtaccgcatcttgcaccaactatgcaattacgcctgatcaagcccaagcccaatcaaacggcattgaatatttgggccgatttgctcagatgttataaggaatttcgtcaacagcgcaatgatggcaatcagccaaaccgcccaggtcgtagccgttggcccgagccagatgcgctgcgacgattaactcgtcaacgttcaagacttcatgaacaaccactcagtacgatcgatgccttcccgcgtggagaatttggcttaccgattattttccatttcaaagatagtgatgatccaggcgactcagaattgcggctccaggcaaaccatgaattcagccaacaaaaaggtgaccgttttgccagcccaatgttgctcaaaccagttgcctcaactggtcagctttttggattaatcgcagtgtttgaaggcagcaccctcgatggtcggcaggcaattatcaaaaaccgccgaatcactgctgccgcagtaatcattgatgtatcagagagtcaggctagaacaatcgttgataaacagcgccgccctatgcttaccaatcccagtattattaccagctttcttgaaacaatagaggaataa

SEQ ID NO: 214 - protein, 439 aa, Herpetosiphon aurantiacus
MMFNRKPSAESSVNCPDVKKIENHKPPIEPIIRNYRLITPLMGGGVKAGENDSNFLIRPSSIRGQLRFWWRACFGGSHQPQSHDALLADMFARESALFGKAADSQSSGASAVQVEIEVINSGSQFRVIAKNGQEVKISAMNSPYGYSAFPLQDKQNASVREGIEFKLTIHLKSAEQREELEKVLWAWQTFGGIGARTRRGFGVLQALDKANHRFAFANKAELQQHIRAIIGNRSYWPNGVPHLAPTMQLRLIKPKPNQTALNIWADLLRCYKEFRQQRNDGNQPNRPGRSRWPEPDALRRLTRQRSRLHEQPLSTIDAFPRGEFGLPIIFHFKDSDDPGDSELRLQANHEFSQQKGDRFASPMLLKPVASTGQLFGLIAVFEGSTLDGRQAIIKNRRITAAAVIIDVSESQARTIVDKQRRPMLTNPSIITSFLETIEE

SEQ ID NO: 215 - DNA, 1191 bp, Herpetosiphon aurantiacus
atgacacttgatctctggctaattcagccattcaactccttggtaattgccgatggtcgcccatttgaaaaccagccaggtgcccgcgccaaaagcctcagtttcccaccaccgtcggtcacggttggcggctttcgggcacgggctggagtgaaagccaactacaatttttccgccaaattaagcgatcctgaatataccaatctcttagcgatgcaggtacgtggcccgattctgctcaaagaaaccgttgatttgttgattccatttgttgcaatccctgccgatgccttgattcgtcaggatggggcaaatgttacctgttatcgcttacaaccactcgacccacgctatttcccgactgagcaaactgatcttgtgcttgggcagcagcctgatcaaccaaggtttagcttagttgggagtcaacagcacaccaaaggcaaagcccccgcaaacctaccacgcttttggaattgggaaaggctgtttttaccatggttaatcaatccaccgatccagccattcgatcttgagcagcagcgagctgctggccaaatgctcgacttagagggcgatacccgaacgcatgtagggattaagccaagcacccaaatcgctgaggatggccaattattccaaacccaaggcctgagttttcaatcgcttgaggctggctatggcctaggtttatggagcagcacgccaatcgatccggcagttgccagtttaggtgctgaacgtaggttagttgaatggtatcgagttccaagtggtactgccgctggcattgaaacaattgagccaagcattctagccgcgattgtccaaaccaaacattgtcggattatcctgctcacaccagccatttgggatgcaggcttttatcccaaacatttaccaacttttggcttgccgatgacagccactattaaagccgtggtaaaccctcggcccgaatatgtttcaggttgggatttacgcctccaacgcccaaaagcaacccgccgccttgctgccgccggcactgtgctgtttgttgagcttactggcagcgatgctgagattgagcaatgggcacgccaactctggtttagcaacatcagtagcagcgagcaagctgccaaagatggctttggattggcagtgttgggcatatggaatgatggctatttacaggagctagcatga

SEQ ID NO: 216 - protein, 396 aa, Herpetosiphon aurantiacus
MTLDLWLIQPFNSLVIADGRPFENQPGARAKSLSFPPPSVTVGGFRARAGVKANYNFSAKLSDPEYTNLLAMQVRGPILLKETVDLLIPFVAIPADALIRQDGANVTCYRLQPLDPRYFPTEQTDLVLGQQPDQPRFSLVGSQQHTKGKAPANLPRFWNWERLFLPWLINPPIQPFDLEQQRAAGQMLDLEGDTRTHVGIKPSTQIAEDGQLFQTQGLSFQSLEAGYGLGLWSSTPIDPAVASLGAERRLVEWYRVPSGTAAGIETIEPSILAAIVQTKHCRIILLTPAIWDAGFYPKHLPTFGLPMTATIKAVVNPRPEYVSGWDLRLQRPKATRRLAAAGTVLFVELTGSDAEIEQWARQLWFSNISSSEQAAKDGFGLAVLGIWNDGYLQELA

SEQ ID NO: 217 - DNA, 1887 bp, Herpetosiphon aurantiacus
atgaatcgatcgctgttgttgatcgccctagggccagttcaggaatttatcgagcaggctcggcgcacccgcgatgtctggtttggttcgtgggtgctcagtcatcttgccaaaaaggtcgcccaaaccctgccacgcgaaggcttgatctttccaactggcgatagtttgccctcgcccgaagccgaaaatagcgatccaagtactgaacgaatcagctatagtaaccaaattttggtgatcgtgcccgatgcccaagcagccattacccacgcaaaggcagcctttgatcaagaaattgaccaattcgtaaacattctgctgaaaactaaacagatcaattggctcgaaggcctgtcggaagagcagcgtgaacagcagcttattaaacaattaaaagatttatttgagtttcagtatgtatatgttgatttaccggatgaccagcactatgcgcaacaacgcaaaaagctttaccagctctatgcagcacgtaaaaatacccgcaactttggcttaattgattggcaacaagacccccaaaatatgaagcgctcggataaatcgtcgctcgatggctggcacacgctaatagccaatggagcaaaatcgggcgaaaatctctcagccgtcgatttactcaagcgtatgctcaaaccacaagatttagaccaagcctatccaaaaggtttagacggattcccaagtacttcgcatatggctgcgctggcatttgctgaacatgttaatcaaagcactttagctcgccaaggttgggaacgctatatcaataatctacgtagcacaggctatcgcatcactgaatatttaccacgagttcagcgctttgatcgaattgccctctttccaagcgaaaatactaaccgcgatttttttgatggttcattggtttttgagtcgcgcttaggggaagatttcgccaatactgatttgaatactgtaattattaagcaagcacgcggctatttggaagattttataactgcttatgccaaacaacgcccaaatccctattatgcgattattgctgccgatggcgataaaatgggcaatttaattgattcgattagcgatgtacaaattcatcgcgatttatccaaggttgttacaacatttgctaaagatgcagctcaaattctagaaaatgattaccaagcagcagtcatttatgctggtggcgatgatgtactagcgcttcttccattacatacacttttagcagctaccaaaaaaatcagcgatctctttatcgaatatatgcaaccactagccgagcaacaggctgttagcacaccaacactctcggttggggtggcaattgtgcatcatcttgaagccttgcaggattcaattcaattggcgcggaaggccgagaagctagccaaaaagccgcgtaatgccttagcaattattttgagcaaacgtaatggctccgataaaaccattgttggtcagtgggatacagaattttatcaacacttaaccaaattagttgagctgcattgccaacaaacaattcctgatggctttatttttgagcttgatgagctactcaagcgctttgactttgggcttatcaatgatcgaacagaacttcaacaaacgctcaagattattgaacatgaaacgctgcgaattttgaagcgcaaacaaattcagtctgcaggcgaagctacatttttggctgctgatgtgattaatctgctccaaaacattattggctattgttcgagtcattcatcaaactcagatcaagcagaccaatatctgcgcgattttatcgccatgaatttagtggcacgggagttagccaatgttcaggccttatttgaaaagactcagccccaaggagtacctcaattatga

SEQ ID NO: 218 - protein, 628 aa, Herpetosiphon aurantiacus
MNRSLLLIALGPVQEFIEQARRTRDVWFGSWVLSHLAKKVAQTLPREGLIFPTGDSLPSPEAENSDPSTERISYSNQILVIVPDAQAAITHAKAAFDQEIDQFVNILLKTKQINWLEGLSEEQREQQLIKQLKDLFEFQYVYVDLPDDQHYAQQRKKLYQLYAARKNTRNFGLIDWQQDPQNMKRSDKSSLDGWHTLIANGAKSGENLSAVDLLKRMLKPQDLDQAYPKGLDGFPSTSHMAALAFAEHVNQSTLARQGWERYINNLRSTGYRITEYLPRVQRFDRIALFPSENTNRDFFDGSLVFESRLGEDFANTDLNTVIIKQARGYLEDFITAYAKQRPNPYYAIIAADGDKMGNLIDSISDVQIHRDLSKVVTTFAKDAAQILENDYQAAVIYAGGDDVLALLPLHTLLAATKKISDLFIEYMQPLAEQQAVSTPTLSVGVAIVHHLEALQDSIQLARKAEKLAKKPRNALAIILSKRNGSDKTIVGQWDTEFYQHLTKLVELHCQQTIPDGFIFELDELLKRFDFGLINDRTELQQTLKIIEHETLRILKRKQIQSAGEATFLAADVINLLQNIIGYCSSHSSNSDQADQYLRDFIAMNLVARELANVQALFEKTQPQGVPQL

SEQ ID NO: 219 - DNA, 47 bp, Herpetosiphon aurantiacus
gaactcccctcgcccgccgcagtgggagaggggtcgggggtgaggga

SEQ ID NO: 220 - DNA, 942 bp, Herpetosiphon aurantiacus
atgagaagtagtcgtttagatattaaatatgagcatatttcaacaaaagataggcctagtgattgtaatgcaggtttatggcttgatcgctatttgcccacccaatccaagcaattaactaacgcagagcaatcaattaattcattaccccagcattttgccgatgttaccaaaattgcgcaccaaatgcatagctctaaactgtatcaacaattttttgcccgctggttgaacacattaaaggaaattcccgatatttgtttgctgaaggcggaagtcaagggtcgcatggtcgtggggctgggagccgaaagtgtgctcgaaaactcaattgccttgcaacgcacctatggcatgccctacatcccaggtagcgcattaaagggtttggcatcgagcttcgcccaccaacgccttggccaaagcccagccaatgcagctcctatcaacgattgggctaagggtggcaaatttcatcgcgaattatttggcacaaccgagctaagtggttgcgtcagcttttacgatgccttgtatattcctcctgataccccaaaaccagatggccctttatattccgatgtgattaccgtgcatcatcgtgactattatcaaggcaagaaaaaagtctcttccacagatggtcaagcgcagagcaaaaagcaagctttttccaacaggaatcaagagcaaagtatgccgccagccgattgggatagcccaacgattattccatttctcagcgcaactggccactatttggtagcactcagtggagtagaaggttggcgtgatgccgcccgcacgttgctagccaatggcctgacgcatatgggtattggcgcaaaaacatctagtggttatggccgaatgaaacttggggaaatgtgtaagaacgagcaacaaatcgaagccctacttcaacgtttgaataaaaaataa

SEQ ID NO: 221 - protein, 313 aa, Herpetosiphon aurantiacus
MRSSRLDIKYEHISTKDRPSDCNAGLWLDRYLPTQSKQLTNAEQSINSLPQHFADVTKIAHQMHSSKLYQQFFARWLNTLKEIPDICLLKAEVKGRMVVGLGAESVLENSIALQRTYGMPYIPGSALKGLASSFAHQRLGQSPANAAPINDWAKGGKFHRELFGTTELSGCVSFYDALYIPPDTPKPDGPLYSDVITVHHRDYYQGKKKVSSTDGQAQSKKQAFSNRNQEQSMPPADWDSPTIIPFLSATGHYLVALSGVEGWRDAARTLLANGLTHMGIGAKTSSGYGRMKLGEMCKNEQQIEALLQRLNKK

SEQ ID NO: 222 - DNA, 471 bp, Herpetosiphon aurantiacus
atgagtaattcagtctttcaaactcgtgatcaacaatatgctgcttcagcgtatgctcatattgaagaagttctagaaaaatatccaaagctggatgttaaatcaggtgatacactcgcactgttgtacaaaaaaaatcgcaaacgctacggggtcatagcacataaattgcctatattaattagaactgctggtttaactcaagcattggcatttattagttcacggagtaagaaaaagaaaactggcaaagaagatgaatttagtttattcctaagccatcttgcaaaaacaataaacatagatacaaatgatcttgttcaatatagtatccaacaacacctatcaaattatatgtacataacccaacaggtgcttgatgcacttttatggtataagcgctttgctcaaagtgtacttgatgttgatccgactgatcaacttgatgacgagcagggagctgaagtatga

SEQ ID NO: 223 - protein, 156 aa, Herpetosiphon aurantiacus
MSNSVFQTRDQQYAASAYAHIEEVLEKYPKLDVKSGDTLALLYKKNRKRYGVIAHKLPILIRTAGLTQALAFISSRSKKKKTGKEDEFSLFLSHLAKTINIDTNDLVQYSIQQHLSNYMYITQQVLDALLWYKRFAQSVLDVDPTDQLDDEQGAEV

SEQ ID NO: 224 - DNA, 882 bp, Herpetosiphon aurantiacus
atgactactaaactcgtttttgtgcatgcgctttcaccacttcatgctggcactggccaaggcgctggagttatcgatttgccgattgctcgcgaaaaggccactaatttgccctatttgcctggctcatcgctcaaaggcccgttgcgcgatggctacactggcgctcgtaaagatgaaatctttggaactgcatcagataacgccactggtaatgcaggttttgttcaattttccgatctgcgcttgttgtgcatgccagtgcgtagcttgtatggcaccttcgcatgggtcacttcgccgtatattctcaatcgccttgcccgcgaaatcaaaaatctttttactgaaaacaccccaccaagctggatcgaaaaccctgatgtggatcaatgttttgtcgttgctggatcagcacttaaatcaaacttaccaaaatcagcaaagcgcaaggatatttatctagaggatttagattttgaatctcaagcggatcaagctgagctagtaacccaatgggctgattggctgaaaaaacgtatttttggcgattcaccagagtggcaaacgatgtttgttgagcgtttctgcatcgtcaatgatgatgtatttagtttccttttgaatactgccaccgaaataaccgcccgcattcggctcaacgatgagaccaaaacagttgctgatggtcaactttggtatgaagaagctttgccagccgaatcgattttggctggcttgatgttgattgccccgccagcctcaaaaacagacttaattcaaagcattacgactgagctaccacgcctgtggcaaaaaccaattcagcttggaggcaaggccaccgtcgggcgcggaatttgtcgcgtgattgtgaaatag

SEQ ID NO: 225 - protein, 293 aa, Herpetosiphon aurantiacus
MTTKLVFVHALSPLHAGTGQGAGVIDLPIAREKATNLPYLPGSSLKGPLRDGYTGARKDEIFGTASDNATGNAGFVQFSDLRLLCMPVRSLYGTFAWVTSPYILNRLAREIKNLFTENTPPSWIENPDVDQCFVVAGSALKSNLPKSAKRKDIYLEDLDFESQADQAELVTQWADWLKKRIFGDSPEWQTMFVERFCIVNDDVFSFLLNTATEITARIRLNDETKTVADGQLWYEEALPAESILAGLMLIAPPASKTDLIQSITTELPRLWQKPIQLGGKATVGRGICRVIVK

SEQ ID NO: 226 - DNA, 1497 bp, Herpetosiphon aurantiacus
atgaatcgtaaacctaaattctcaccactaaaaatagcatacgagcatccaagctataaagctgggaagaaccctagcgcatttaccgttggcgaacacacctatatcaccgaaacccgcagctataggttgatcaccccattatttggtggcggcgttaaggctggggtgaatgacccaattacgccaattcgcgccagtggcattcgcggtcaattgcgcttttggtggcgagctattcgcggcggcggctatcgctcaattgatgatttacgggcaaaagaggctcagatttggggtagtgccaatacttcattctcttctgaaaaagaaagagaggatgaagattctggcaatctggtagatgataaaaatcaagaaaataataaattaaaaaatatcattcctattcaaatctctgttgagataagttctgatggagaagaaaaatatccatatgttatgaaaaagaatgctataggaaattataacccagagcctatatctagtactgcgcctgcatatgcatcttttccattaaaaccagaaatgaacgctataagaaaatatggacctaaaactcctatcaatcctattcgtaataagattatttttagattaaaaattacctactatcagcatcataagctggaaattcaggctgcactgtgggcatgggaaatgtttggtggagtcggtggtcgtacccgacgtggatttggttcgatcactcagtgtgatagtgataataaaccacaaaatgcagaatcagttgcgcaatggttaaaacaaaacattaaaaattatacagaagatatttcaaaaagaggttttaattggattaatgatattcctaatattgtagaaagtattaacgagagtaaatttttctgctcatcaaaaggcttaaatggtatacgtatttggaataatatgataaatacgttacaaaaatttcgccatcaacgaaatcagtatggcaaaaaatttggtagaaatcattggcctgagccagattttattcgagaaatcacgggggagcaatctaatgatcatcaagaagctattattaaggttgacaaattcccacgggcagcctttggattaccaataatattccattttatcaatcgtaaagataaaaaaaatcctaatgctcctagagatccttatgatacaacgctagtgcccaaaggttttgagcgcttttctagccctttgattattaagattattcaatgtgctgatgaaagttatgttggaattgcacttattttgagcaaaacccaagtccctaatcaattacaactgaaaaagggtggaactccattgctcaatcctaacgatcaaaccgaagattttcaacatctcttgacacctaatgaagcacaacaaatcaagcaaattgaagctaataaagcgtcaggttcactactgaatcaaggaaccgatattcttaaagcatttttagcctatcttgcgaaggagctacgataa

SEQ ID NO: 227 - protein, 498 aa, Herpetosiphon aurantiacus
MNRKPKFSPLKIAYEHPSYKAGKNPSAFTVGEHTYITETRSYRLITPLFGGGVKAGVNDPITPIRASGIRGQLRFWWRAIRGGGYRSIDDLRAKEAQIWGSANTSFSSEKEREDEDSGNLVDDKNQENNKLKNIIPIQISVEISSDGEEKYPYVMKKNAIGNYNPEPISSTAPAYASFPLKPEMNAIRKYGPKTPINPIRNKIIFRLKITYYQHHKLEIQAALWAWEMFGGVGGRTRRGFGSITQCDSDNKPQNAESVAQWLKQNIKNYTEDISKRGFNWINDIPNIVESINESKFFCSSKGLNGIRIWNNMINTLQKFRHQRNQYGKKFGRNHWPEPDFIREITGEQSNDHQEAIIKVDKFPRAAFGLPIIFHFINRKDKKNPNAPRDPYDTTLVPKGFERFSSPLIIKIIQCADESYVGIALILSKTQVPNQLQLKKGGTPLLNPNDQTEDFQHLLTPNEAQQIKQIEANKASGSLLNQGTDILKAFLAYLAKELR

SEQ ID NO: 228 - DNA, 1455 bp, Herpetosiphon aurantiacus
atgaatacacgccgcgaacgttctaagcaaaagcaacaagccaaaaagcaaaatagtagcaatacccaagtcattgcgcaaaatttagtagccccaatcaatgatcaagtagatgaattgataagtgtgtccaacaattcaattcaacctgaggcaagcgcggatcaaccagccaatgctgaaattacaactcagcaagcgtggctgattgagccacgtgacccgttgattgtgcgcgatggccgaccatttaacaatacacctggagcacgcgcctatactcagtcgtttccaccaccatcggttttggctggggttattcgctcccaaaccgcctatgcttcaaaactccaatttactcgtaactccgatgacaaccgacatcagggaaataaattacagccaattcaaatttatgggccagtattagttgagttgttagagccaaatgaagccaatgctgaagctgaattcttatgccctgcacccgccgatgcactgttgtttgagcctgaatcaaaaatcgaagataaaccatccgagtctgtgccttggctccgccgtttaatcccaattcaggctcctgcgaagctcgtcagtgattttaacgagcttggcttggttggtttagttgaacccgatccgcgtaagcccgccaaagagcaaccgcacttttggtattggaagcgttttttgcaatggttgcaagatccagcaggattgattgatcaaactcaaactgccgcagtacaaaaaagcactgacttgggaattcaaggcttgccaattgatcaacggacgcatgttgaaattaaacctgatagccaacaagccgaagatggtcgtctatttcaaacccgtggcttgagctttacccaagccaatgatcaacgattagcagaagcacgacgtttggcattatatgtgcacgccgattaccgcgatacaactggtttaactattccacagccaagcattgcacctttgggcggcgaacgccgtttggcgcgttgggagccaactgagcgtcagttgccagcatgcgatcaagctattctcgatgcaatcgtaaaagccaacgcctgccgtgtaattctgctcaccccagcgatgtttgcaaagggctatcgcccaacttggctattcgaagatccccgaggtgtccagccaaagcttgcagcaatcgcgatcaagcgtgctcaaggtatttcaggctgggatttagcaattcataagccgaaaccaacccgccgcctagctcccgctggcacggtctttttccttacattccctgaaaaggaaaattcggctgcaattgaagcgtgggttcgcaactattggatgcattgtattagcgatgctgagcaagatcgccgcgatggctttggattagcagtgctcggcgcgtgggatgggaagttggctaaaatcaagggagtaccaaatgaatcgtaa

SEQ ID NO: 229 - protein, 484 aa, Herpetosiphon aurantiacus
MNTRRERSKQKQQAKKQNSSNTQVIAQNLVAPINDQVDELISVSNNSIQPEASADQPANAEITTQQAWLIEPRDPLIVRDGRPFNNTPGARAYTQSFPPPSVLAGVIRSQTAYASKLQFTRNSDDNRHQGNKLQPIQIYGPVLVELLEPNEANAEAEFLCPAPADALLFEPESKIEDKPSESVPWLRRLIPIQAPAKLVSDFNELGLVGLVEPDPRKPAKEQPHFWYWKRFLQWLQDPAGLIDQTQTAAVQKSTDLGIQGLPIDQRTHVEIKPDSQQAEDGRLFQTRGLSFTQANDQRLAEARRLALYVHADYRDTTGLTIPQPSIAPLGGERRLARWEPTERQLPACDQAILDAIVKANACRVILLTPAMFAKGYRPTWLFEDPRGVQPKLAAIAIKRAQGISGWDLAIHKPKPTRRLAPAGTVFFLTFPEKENSAAIEAWVRNYWMHCISDAEQDRRDGFGLAVLGAWDGKLAKIKGVPNES

SEQ ID NO: 230 - DNA, 1851 bp, Herpetosiphon aurantiacus
atgtctcatttattactaatcgcgattggcccagttcaagatttcatcgccagtgctcgtcgcacccgcgacctctggtttggttcgtggctactcagcgaattagccaaagcagcggcaaaaagcatttatcaagctaaaggcaatttgatctttccttatccaaccaatccagcccaagatttagcgccagaaagtgccttcaatgtgcctaacaaaattttggccaaggtagagggcgatattaaaaagattgctgacacagctaaacaagccttggagcaacgtttaaatcagattcgtgatggcgcatttgatcaagttaaaggaacgttctacgatgaacaagctgctgatcaaatcgccgcattggttgaattcaattgggttgccctgcccttagggactgattatgcgaaaactcgcgagcagcttgagcacttaatggcagcccgcaaaaatacccgtaattttagcgaggtgacgtggggcacaaacgcgccaaaatcctcaatcgatggcgaacgtgaatcggtaattgatgaaaaatactatccccctgctgggatggcgaatacctcgccagaatacgccaaaatcgtggctaggctctatcgtgattatggcatcaacgtcggtgaacgtttatcaggcgttgatatgctcaaacggcatggtcaaaaaggtatcgattcaaggtttccaagtacctcacatatggcggcaattccgatgttcaactttttaaataaatatgatgaggcaaatgccaatatcagtcttattgatccatggaatagatacattaattttttcaatacaaattccactctgataaaatatattgacaatgaaagaaccccaaaatcacaaaagaatttcggtaatatagatggatcactcttatttgctgagcgatttaacgacacattagaaggtaatgatctatccgatgctcaaaacgcattggaagcattctataccgctttaggtgttaaaaaacgtcccattccctactatgcaatcctccatgctgatggcgatgcgatgggtagtgtgattaataaccaagaggtaattgaaaaacatcaggaaatatcaaaagccttagcaaaatttgcagataataaacgtgacatcaatcctttgaatgattctgaagagcgatctgttgcaaccatcgtcgcaaaacatcaaggagccttagtctattcgggcggcgatgatgttttagcatttttaccgttgcatactgcattggaatgtgccgatgcgttggctaaaaggtttcaaacgcttttaagtaactttaaagataaaacagatcgttcgccaacgctctcggttggcattgcaattgtccatcaccttgagccattatccgatgccttagatttggcacgcgctgctgagaaaaaagccaaaggctttgtaggcaaaaatgcgctggcaatcaacctcagcaaacgtggcggtgcagatcgaattatcgttggctcatggattgaaagcaaatattcattttacaatcgacttaaaaaattaattgaatggcatcaaaccgatcaaatcccccttggttttgcctttgaactgcacgatttatctattcgcctaaaagacttgcccgccaacatttttcacgccgaagccaaacgaatcatcgagcgcaagcatacaagcaacggaataaaggtctcgtcggcgattgctacagaattattagctatgattaacgatttggttccagaaacgctgacccaagcccacataatgatccaacaatttgcagatgaagtaattattgcagaatttattgccgacgcacaaaagctcgccaatggtaattaa

SEQ ID NO: 231 - protein, 616 aa, Herpetosiphon aurantiacus
MSHLLLIAIGPVQDFIASARRTRDLWFGSWLLSELAKAAAKSIYQAKGNLIFPYPTNPAQDLAPESAFNVPNKILAKVEGDIKKIADTAKQALEQRLNQIRDGAFDQVKGTFYDEQAADQIAALVEFNWVALPLGTDYAKTREQLEHLMAARKNTRNFSEVTWGTNAPKSSIDGERESVIDEKYYPPAGMANTSPEYAKIVARLYRDYGINVGERLSGVDMLKRHGQKGIDSRFPSTSHMAAIPMFNFLNKYDEANANISLIDPWNRYINFFNTNSTLIKYIDNERTPKSQKNFGNIDGSLLFAERFNDTLEGNDLSDAQNALEAFYTALGVKKRPIPYYAILHADGDAMGSVINNQEVIEKHQEISKALAKFADNKRDINPLNDSEERSVATIVAKHQGALVYSGGDDVLAFLPLHTALECADALAKRFQTLLSNFKDKTDRSPTLSVGIAIVHHLEPLSDALDLARAAEKKAKGFVGKNALAINLSKRGGADRIIVGSWIESKYSFYNRLKKLIEWHQTDQIPLGFAFELHDLSIRLKDLPANIFHAEAKRIIERKHTSNGIKVSSAIATELLAMINDLVPETLTQAHIMIQQFADEVIIAEFIADAQKLANGN

SEQ ID NO: 232 - DNA, 28 bp, Marinomonas sp
gttcgccgccgagcacgcggcttagaaa

SEQ ID NO: 233 - DNA, 600 bp, Marinomonas sp
atgaaacactacatcgacataaccttgttaccgagtgacgacattggtgttcactttttgtggtccaagctcatgatgcaagtgcaccttgctctcgtggaaattcaaaacgaacaaaagcaagtgcccgttgcagtgagctttcccaaataccaaccaagagagaatgaaaagctcggttttgttggtaacaagcttagattgtttgcgaatgacaaaaccgaccttgagcgtttgaattttggtaaatggctacatcgtcttgaagactatgtccacataaaaagcattgccgatgttccgaatgacgttattagctatgagtcctttaatcgtcgcagcaagtctggttcgccagataagcacattaaacgacgtatgcaacgccataacgaaacgtgggaacaagctgccgccttttttaaagggtatagcatggaaaaagcggataaagacctgccttttattcgaatgaaaagcttacacagtgataacgagttctgtatgagcatcattcgaaaagaggccgcaccctcgaataaacacattatgttcaacacctacggactcagtgcagaaggtgttttacctaagttttaa

SEQ ID NO: 234 - protein, 199 aa, Marinomonas sp
MKHYIDITLLPSDDIGVHFLWSKLMMQVHLALVEIQNEQKQVPVAVSFPKYQPRENEKLGFVGNKLRLFANDKTDLERLNFGKWLHRLEDYVHIKSIADVPNDVISYESFNRRSKSGSPDKHIKRRMQRHNETWEQAAAFFKGYSMEKADKDLPFIRMKSLHSDNEFCMSIIRKEAAPSNKHIMFNTYGLSAEGVLPKF

SEQ ID NO: 235 - DNA, 771 bp, Marinomonas sp
atgaattttaagcgaacatggctttttggggttgtggtatttctcttaccgcttttattcattgtgatagcagggatatgtggcaatgaaataggcattcattcgattgatgacaaggctaacttgtattttaaaggaggctttattcatagtcttgtcgtttcagtttcaacaagcttgatcgcggcggggattgtgtatctttttattgataaaaaattaagggagttattggctaatgatgaagtgattacggtagtcttaaaaaccaaagacggtgaaacgaaagaatgtcctccgatgagccgtaaagacttttgtcgtcaagaggtgttgggttatttaggaatgctggggggaccggagcgtttttcattgaattatatgaaaaagaaagagttcggaaagcgcatcctagaaatacaacagggcaaggggagtgatgcactgttcatacactgcactgatgatgagtttaaacaatttgaccctgactaccgtgagaatgatgatataacggttgttttacaatctgattcgaattcggataacaaagtgacgtgtccgcccatgccaaggaaaaacttttgccgtgccgaagtgcttggctacattggtatgttcagtaacgtacaatactttgaaataaaaaaactaaaaagcccacaattccttaaagatctttcggaaataagcaaaagcaaaggcgcccaagaatttattatcgaatgtacggagagcgaatttaaacaatttgaggggacggtatga

SEQ ID NO: 236 - protein, 256 aa, Marinomonas sp
MNFKRTWLFGVVVFLLPLLFIVIAGICGNEIGIHSIDDKANLYFKGGFIHSLVVSVSTSLIAAGIVYLFIDKKLRELLANDEVITVVLKTKDGETKECPPMSRKDFCRQEVLGYLGMLGGPERFSLNYMKKKEFGKRILEIQQGKGSDALFIHCTDDEFKQFDPDYRENDDITVVLQSDSNSDNKVTCPPMPRKNFCRAEVLGYIGMFSNVQYFEIKKLKSPQFLKDLSEISKSKGAQEFIIECTESEFKQFEGTV

SEQ ID NO: 237 - DNA, 1110 bp, Marinomonas sp
atgactgaactacgtcgacaagtgattaatgacttgctcaatgactgcaagagtacaaccattaaccccagtttatggctgcaaaaagggttaaaagaaaccacaggggaaatcggtgataacgccaaaaccaatcatttaaaagatcttgttggttttaagtgtgatctataccccaaagcctttaatcgctggtttaatctcacaagcgacgagaatcgttttagccaaaccgtaatgacacttgagaaccgtttgctcatcggtttaacgggcaacggtacattagaaacagggtgcagtttaagccacaactacggcatgccttatatcccaggttctagcgtaaaaggtgtggtgcgggcttgggcagagcagcatttaaaggataacgctgaagcgatagccgacctttttggcacccgtgatagtgatgatattaagcgcgtatctgggctagtgacgttccatgatgcgtggtgggcgccttttagtaaagggactccagagctaaagccgtttgttttagatgttgtcaccacccaccatcaaacctattacaacggcggaaaagcggaaccatcagataaagatagccccatccccaatcatcaactggctgtgtacggaagttttctgtttgttatcgaaggtgcacctgatcacgttgaactgtgtcagaagatgctggctcaagcgctacaagataacggaatcggtgcgaaaaccgcggcagggtatgggtatatgagcgttaatcacaagctttactacgaattacaacaggaagctgaaaaactgttgccgcctgaagttcgcgagaaacgaaaacaggaagtaatacaacgtcaacagcaggtcgaaaatgctaaaaccgttgagcaagtttgtagagaattaaaggacgattatgaaaataagaagggtagcgaagaatacatccaaaaattagatgagcgtattgattatgctattcagaactggctcgtggaggatcgtttgtctctagccaagtgcttaaatgatataggttatattccaaagaataagaaaaataaaaatcacgatataagaaaagagcgattaaagcagctaagaggtgaaaaatga

SEQ ID NO: 238 - protein, 369 aa, Marinomonas sp
MTELRRQVINDLLNDCKSTTINPSLWLQKGLKETTGEIGDNAKTNHLKDLVGFKCDLYPKAFNRWFNLTSDENRFSQTVMTLENRLLIGLTGNGTLETGCSLSHNYGMPYIPGSSVKGVVRAWAEQHLKDNAEAIADLFGTRDSDDIKRVSGLVTFHDAWWAPFSKGTPELKPFVLDVVTTHHQTYYNGGKAEPSDKDSPIPNHQLAVYGSFLFVIEGAPDHVELCQKMLAQALQDNGIGAKTAAGYGYMSVNHKLYYELQQEAEKLLPPEVREKRKQEVIQRQQQVENAKTVEQVCRELKDDYENKKGSEEYIQKLDERIDYAIQNWLVEDRLSLAKCLNDIGYIPKNKKNKNHDIRKERLKQLRGEK

SEQ ID NO: 239 - DNA, 426 bp, Marinomonas sp
atgatctcaaggaatcaaatcattgcacaaaccacttatcagcaggtggctaagcttgaagagagtggagacaaaaagctgcataagagctatgccacgatagtgcataaactgcctgccatgattttgcaaaacggcttaccgcaagccacggggtttctactttcaaaagcttctgaagatgcccatgcaaaattattggatcacctactctctgcttttcagaagattgataaagacttttacgatgttcaagacagaagagcattccatgagcaaatcattgcttccgatctcaagaaaattatgcgctacacccgcgaagcgttagaaatatcaggctggctgcggcgttatgtgcaaggtgtattaaagcgtggcccatctggtgacatggaagatcagaaggagccaagtcatgactga

SEQ ID NO: 240 - protein, 141 aa, Marinomonas sp
MISRNQIIAQTTYQQVAKLEESGDKKLHKSYATIVHKLPAMILQNGLPQATGFLLSKASEDAHAKLLDHLLSAFQKIDKDFYDVQDRRAFHEQIIASDLKKIMRYTREALEISGWLRRYVQGVLKRGPSGDMEDQKEPSHD

SEQ ID NO: 241 - DNA, 852 bp, Marinomonas sp
atgtcattttatacctatcatcttattacgcaaacgatcctgcattgtggctcaggccaatcggttggcattgtcgatcaaccgattattcgtgagcgagcgacaaacctgcccatcgtgcctggcgcaaccctacgtggcgtactgcgtgcgcatttatcagcacagaaagacaatgccccattaacgaaagcgttatttgggcctttagcgaaagacggcgctgaaagttttgctggcgcgctctctatcaccgatgcgcacttattattactgccggtacgcagcctatatggcattgtggcctatgctacgtgcccgtttattttgcagcgctataaaaaagcgctgggaatagccattgatctgccagctgaaagcaaagacaaagcctatgttggcaaagacagcgaaaatatcgctgctgataaagtggtgtttgaagagctggatatcgatgcggttaaggggggtaaagcgcaagagtgggccgagtgtttatctaaggtcatgtattcggatgataaagatgaagcggctcgaactgatttccaacagcattttgtgatcttgcctgatgatgtgtttgcgtatttagcggaaaccgccaccgaagtgcggactcgcattcgtatgaatcaagacacaggggttgtggataacggcgcattatggacggaagaaaatctgcccgccgagtgtgtgctatgggggagctacagtatcaatgaaaaagcgaatgaccaagctcaccaattcaaagaacaagctaatactctgttgcaaatgggcggcaatgcaggtgtcggcagcggtttggtgcaaatgatgacacaggagagtgaatcatga

SEQ ID NO: 242 - protein, 283 aa, Marinomonas sp
MSFYTYHLITQTILHCGSGQSVGIVDQPIIRERATNLPIVPGATLRGVLRAHLSAQKDNAPLTKALFGPLAKDGAESFAGALSITDAHLLLLPVRSLYGIVAYATCPFILQRYKKALGIAIDLPAESKDKAYVGKDSENIAADKVVFEELDIDAVKGGKAQEWAECLSKVMYSDDKDEAARTDFQQHFVILPDDVFAYLAETATEVRTRIRMNQDTGVVDNGALWTEENLPAECVLWGSYSINEKANDQAHQFKEQANTLLQMGGNAGVGSGLVQMMTQESES

SEQ ID NO: 243 - DNA, 1167 bp, Marinomonas sp
atgaactattttgtattaaaccctctcgatccattgattatccgctccagccgcccatttgaagcgatttcggatgccgaagcggcaaaattcccgccgccgtccaccattgcaggcgcgttgcggaacatacatgggcgcaccattggcattgattttaatgacaggaataatcaagaacagcttaactcactgcttgaggtgcctgtcactggccccttagcggtgaaaattcctcttgatcaatcggtcagtaaactcgaacaaagacatattcttgtcccaaaaccggcggatgcacagtactttgcggtggacaacaagcctaccttggttgggctgcaacctcttcagccgaatgaagacgaaggatgcgatttacctaatggcttgctgccactgtttttatcgcaagacatcgaaggcaaacctgtgagtggtcctaaatggtggtcgctgaccgacttattgaaatggcgaaaaggcgaaaagctagaattttcagatatagaaaaggggggctggacacccaccgagccagatattcgtacccatgtggaacgagataatgaaacgctcaactccgttgacgggcaaatctttcaaacaactggcttaaccatgtggcagcagcctgatcagccgcaaaacttccccagtgagcgtgtggcgatacttgcgggtatagatggcaaggtttccttgcaagcaatgaacttaggtggcgaacggcgcttggcagatgtgactgattgtgaggtatggcctagaccgcccgaaaattttgctcaagagatcattagtgctggtgggttaatcctgacctttctcactccaactatttttgcaaatggatggcgaccaaagtggcttgacaaaggcattccgcctggctgcgagcacttacaccttgaactcaaagccgccgctgtcgaccgctggcagccacaatcgggctgggatctcgccagtaataaacctcgcgccagcgagcgcatgatcctcgcaggggcaacttattggtttgcaatcgtggatggtactgcctctgaacaagaaatagaaaagctgtggatggcacacctgtgtgacgataaacaacataatctcaatggctttggcctgacgcttcccatggcgtattcatggaacgaatcaaagaattaa

SEQ ID NO: 244 - protein, 388 aa, Marinomonas sp
MNYFVLNPLDPLIIRSSRPFEAISDAEAAKFPPPSTIAGALRNIHGRTIGIDFNDRNNQEQLNSLLEVPVTGPLAVKIPLDQSVSKLEQRHILVPKPADAQYFAVDNKPTLVGLQPLQPNEDEGCDLPNGLLPLFLSQDIEGKPVSGPKWWSLTDLLKWRKGEKLEFSDIEKGGWTPTEPDIRTHVERDNETLNSVDGQIFQTTGLTMWQQPDQPQNFPSERVAILAGIDGKVSLQAMNLGGERRLADVTDCEVWPRPPENFAQEIISAGGLILTFLTPTIFANGWRPKWLDKGIPPGCEHLHLELKAAAVDRWQPQSGWDLASNKPRASERMILAGATYWFAIVDGTASEQEIEKLWMAHLCDDKQHNLNGFGLTLPMAYSWNESKN

SEQ ID NO: 245 - DNA, 1839 bp, Marinomonas sp
atggattatttagtggccatcagtattggcccagtacaaagtttgattgaagcggggcggcgtagccaagatttatggtgtggttcgtggttgttgtctgaagtatcgcgtgcggtagcgttaaagctccatcaagaacaaggtggttgcttgattttcccaagcccaaagaatccagatgttgacttgcaaccacaagaccccgattcagacacgcccatagaagccaatatcgccaatgtgattcgtgcggtgattcacgccgatgattctcaacaggtgcgtaatatggttgacgatgcgaaagatgcggcaaaagcccgtttagatgagatcataacgcaagttcgtaagagcaagctggaaggctttagtgtggattggctgcggtttgaacagcaaaagcacgatattctcgaaacttacgcggcttgggtaaaacttgaatcaaaccaatacggtgacgcctccaaacgcttaggcaagctgctctctgcacgcaagcaaaccaagggttttgatccgattcaagatacgaagatcggtttgtttaagtccacgttggatggcgctaataatacgttaaccaatcaagtgcgttgtaaagatcagcagcatgagttgcggctgagccagcgcgaagagttggacattttagggctgattaagcgaaaaacagggcattttgagcaatttactccgttttcgcgcgtagtggcagagccgtggttatcttctcttagttcagagcagcttaaaacccttcaatctcactatcagcctttcgtaaaagaaggcttagccaccacggtaaagggcaatgaagacgcttatcaagacttcccttacgacggtgaatacctgtttcccagccgtatagcgcaagagaaagagcttgatgagaccatcaaaaagaatctactccaatatttgtctaatcttgatgaagaaaaaggcgcaccagtcccttacggagtgttactcaaagccgatggcgatcgcatgggcgagctgttatcaaaggcgaaaaaaacaaaggattcaaccgaggtttctaaagccctacatcaatttgctactaaagtacgaattgtcgtgcgagagcacggaggtcacgccatttacacggggggcgatgatgtgcttgcttttttgccgcttaatacagccttggtatgtgcgcaagagctggccgagctatttgagcaatcaatgaaagcgatagcagagcagcttggtgcggagtgtccgaccttatccgttggcttggcaatcggacattttgtacaaccgatgcgccaactacgccatcgcgctattcaagcggagaagttggccaaaggcaatggactggaaaaaccgcgcaacgcgctggcgatccaattgggcattcgctctggctatgaaattgcatggcgttgccgatgggacgagcaaggaacaatagacgctctgaacgcgtttgtgacggggtttcgcaaaggtctgttacccacacgcattatgcaagatgtattagccatgtcccagagccttaagtggactaaaagcgaagaggttgatcgtgagatagcggtgggcattcgcctcagtgaaatggagcgtatgctcgcacgcgcgtcgtttgcccatcaatattcacaagcgcaactcgaagaagttgataaagaagacaaagacaatcatcgtacatttacacaacacgttgcctcgttaaaactccaattacgcgagcaggcgaaggatcaatcattggtcgaactggcgaatatgctgcggattgcccgttggttatccgcgcggacaacggcggatttaggcaaggaagacatgtcatga

SEQ ID NO: 246 - protein, 612 aa, Marinomonas sp
MDYLVAISIGPVQSLIEAGRRSQDLWCGSWLLSEVSRAVALKLHQEQGGCLIFPSPKNPDVDLQPQDPDSDTPIEANIANVIRAVIHADDSQQVRNMVDDAKDAAKARLDEIITQVRKSKLEGFSVDWLRFEQQKHDILETYAAWVKLESNQYGDASKRLGKLLSARKQTKGFDPIQDTKIGLFKSTLDGANNTLTNQVRCKDQQHELRLSQREELDILGLIKRKTGHFEQFTPFSRVVAEPWLSSLSSEQLKTLQSHYQPFVKEGLATTVKGNEDAYQDFPYDGEYLFPSRIAQEKELDETIKKNLLQYLSNLDEEKGAPVPYGVLLKADGDRMGELLSKAKKTKDSTEVSKALHQFATKVRIVVREHGGHAIYTGGDDVLAFLPLNTALVCAQELAELFEQSMKAIAEQLGAECPTLSVGLAIGHFVQPMRQLRHRAIQAEKLAKGNGLEKPRNALAIQLGIRSGYEIAWRCRWDEQGTIDALNAFVTGFRKGLLPTRIMQDVLAMSQSLKWTKSEEVDREIAVGIRLSEMERMLARASFAHQYSQAQLEEVDKEDKDNHRTFTQHVASLKLQLREQAKDQSLVELANMLRIARWLSARTTADLGKEDMS

SEQ ID NO: 247 - DNA, 1224 bp, Marinomonas sp
atgcgaagaaaaatagacgcaggagtattaaacagtctgcgagaagagttaaaacacccacctgaaaagcaatggcaaacctataactgcacgcttgttacacccatgtatggcggtggagtagaagcgggcaaggtcgatactgagatgcctatccgcgctagttcgattcgtgggcaattacgtttttggtggcggattgcgtgtggcccgtttgatagcactaaagggatgtttgataaagaggcagctatttggggtgggattggtgatgaaggagctaaagcgagtcaggtggagattaaggttcaatctaaatctgtaatggataatgatctcgtaaaatcaaataagtattatgaaggtattaagtatgtttttggttctgccagtataaatggcacagtcgattggctgaaggatggtttcaattttaccttgtttgttcgctgtgatgatgctgtgaagaaagacgttgaagaagccttacggtggtggagttcttttggtggtattggcggtcgcactcgaagaggttttggtgcggttagcatagaaaatgtagagcttattaataatgagcacgatgtatttaaacgcacggatgcagaatcgcctcggctgatattttctaataaaacctatagtcacgcttcggcagcttggaaatatacttcagaaaggttatttgaattccgtcaaaaacctggcattggacgaaacaattcatcgggcaaagccggacgaagtttttggccggaaccagatgcattacgcagattgacggatagtaatgcaaatgggaagcactttccaaagcatgaggcaggtaatatatttgctcgtgcagcatttggtttgcctattacgttgaagctggtagggaaaggtgaaccagcaaaaacagatttaaagcctattaatagtgagcgcatggctagtcctctaattttaagaccttatgggcacgataccgaatggaaagcagtggcgctattactaccaaaatggcaagaagcgttaacagaagagttagaactcactccaaagccaaaaaaacaaataggtccatttcaaaattggccaacagacagagtggccagacaaaaagctgccaaagcaattcgcccaatggaagatggggataaacttcgcgctgatgacccagaacatgggccagacccgctttctgccttcctagactatttcgaaaaaggaaaatga

SEQ ID NO: 248 - protein, 407 aa, Marinomonas sp
MRRKIDAGVLNSLREELKHPPEKQWQTYNCTLVTPMYGGGVEAGKVDTEMPIRASSIRGQLRFWWRIACGPFDSTKGMFDKEAAIWGGIGDEGAKASQVEIKVQSKSVMDNDLVKSNKYYEGIKYVFGSASINGTVDWLKDGFNFTLFVRCDDAVKKDVEEALRWWSSFGGIGGRTRRGFGAVSIENVELINNEHDVFKRTDAESPRLIFSNKTYSHASAAWKYTSERLFEFRQKPGIGRNNSSGKAGRSFWPEPDALRRLTDSNANGKHFPKHEAGNIFARAAFGLPITLKLVGKGEPAKTDLKPINSERMASPLILRPYGHDTEWKAVALLLPKWQEALTEELELTPKPKKQIGPFQNWPTDRVARQKAAKAIRPMEDGDKLRADDPEHGPDPLSAFLDYFEKGK

SEQ ID NO: 249 - DNA, 37 bp, Methanococcus vannielii
atacgaaacgttgatccatcaaaacaaggattgagac

SEQ ID NO: 250 - DNA, 1587 bp, Methanococcus vannielii
atgactaaatatatcgggcttacgatcgggccaatttacgaaacattgaataatgccaaaaaaacgggtgcactatggggttcaagttatattttttcatatatcatgaaaaatataatcaaagagtttaaagagcgggaaataatcgttccatattgtgtaaatgaaggaaaagaatatgaaaaatattatgaaaaagaactcggtgcaggggtatttccagaccgatttattttcaaatccgaaaatagggactacgaaaaacttgaaaatataattgataaattattaaacaaaatttcagaaagtatttgggaggatatccaaaaatcgggatacaaaaatctggataatactaaaatatccgagtttttaaaacaatattttaaaatttattatcttgaaaaagacgtgcctaatggaaaaaatccgatatttgagttaaacaaatatttggatgttttagagttacagccaaaatatgttacccaatctaatatttatacaaaagaagaaaaagtctttgaaaacccattggaactattttttcacaatagaataataaaagagagttttttagccgaagattgttttaaatctgaaaccgacgattctaaagattttagtagatggatcaaatctattcctgaacttgcatcagcagaactaaaaataactaaccctgatgaatatataaaactagaagaactttcaaatccgaaaaatttcactgatgataacgatttggaaaaaaagatttacagtaacttaaaaaaataccccaaatacttaaagtattatgctgtagttcaggctgacggcgacaatatgggaaaaattatttctaaacttaattccgccgatgattttaataatttttcgaaaaagctatttgaatatgctgtagattcatctaaactaataaaagaatacgggggactgccaatttttgcaggtggtgatgatcttttatttattgcacctgtaaaaaacggagaaaaaaccatttttgatttagttggtgacatagataaccgttttgaagaaatttttgatgttgagataaaagatcctgaaatatcaccgtctccttcgctttcatacggcatttcaattaattactacaaacacccgctttacgaagccctttctaatgcaagaactcaacttttcggagttgcaaaagaatattcaggtaaaaatgcagttgcggtaaacgttagaaaacacagtggtcagacatttgatttgtgtttcggaaaaaataaagaatcgtataaaaaatttaatgaattattgaatgtaactttgaaaaattctgaagaaagtgaaaaaatactaaattcaataaaattcaaactttcaaacgaaaaggccattgtagacgaaatagggaaggatgaaatcaaattaaaaaattactttgaaaattcatttaaaaaagatattcataaaaattctgatttgaataaaattatttcttacgtgaatggtgtttacggggacgaacttaaagacccgattaaaaagatagacgcttccttgcggtttttaagtttcttaaatgaaaaaatgggggcggaataa

SEQ ID NO: 251 - protein, 528 aa, Methanococcus vannielii
MTKYIGLTIGPIYETLNNAKKTGALWGSSYIFSYIMKNIIKEFKEREIIVPYCVNEGKEYEKYYEKELGAGVFPDRFIFKSENRDYEKLENIIDKLLNKISESIWEDIQKSGYKNLDNTKISEFLKQYFKIYYLEKDVPNGKNPIFELNKYLDVLELQPKYVTQSNIYTKEEKVFENPLELFFHNRIIKESFLAEDCFKSETDDSKDFSRWIKSIPELASAELKITNPDEYIKLEELSNPKNFTDDNDLEKKIYSNLKKYPKYLKYYAVVQADGDNMGKIISKLNSADDFNNFSKKLFEYAVDSSKLIKEYGGLPIFAGGDDLLFIAPVKNGEKTIFDLVGDIDNRFEEIFDVEIKDPEISPSPSLSYGISINYYKHPLYEALSNARTQLFGVAKEYSGKNAVAVNVRKHSGQTFDLCFGKNKESYKKFNELLNVTLKNSEESEKILNSIKFKLSNEKAIVDEIGKDEIKLKNYFENSFKKDIHKNSDLNKIISYVNGVYGDELKDPIKKIDASLRFLSFLNEKMGAE

SEQ ID NO: 252 - DNA, 1089 bp, Methanococcus vannielii
atgtcgaattatttggtaaaattgactccgatagataggtatttttttggcgggaatgaaacatttggggatggaaaaaatacgaattatttcgttaggtctaaagaatttccccaacagacaagtcttcttggaatgataaaaaaggaaattttaatcattactggagtttataaagaagattttaaagaatatagggaaaaagaattggaaaacaccattggaaaaacctttaaattgtccgattcaaatcaaaatcacggaataataaattctatttctccgttatttttgcttgataatgaaaataacatatattataaagcacccctcgactatgggctgacttttgtaaaatctgacggtaaatgtaattttggaaatactgaaaaagagtatttacctttttttgaaaattacgatgctaaaaaaggccttccaaacaaaatactttctactaaaatcttgtcaaatagaacagattatgaactgtcggaaatttttaaagaggatgttagaattggaataaatagaaagaatggggaagaagatggattttataaacaaatattctacaggctaaaagaaggactttcttttgcattcgttctgaatattgatgaaaataatgaacatgcaaaaaaatttaaaattgaaaatgacagtcacaaaaacgtttgttatattggtgcggattcttcaggctttaaactcgaaataaaagaaattaatgacccatccagttatattatgaaaaattttactgagaatgatattcaaaaaggcgaaacttcctcaaaaaaatttaaaagacttttgcttgtttctgatacattcttaaaagaagaagattattgtgaaattttaaatctttctgaatttattattggagaaacggaaaaatttagaaacatggatacgaaatccaataaaaaatctgaaaaatatgttttcttaaaacgaagttcagtaatctattcaaaaactgaaaattcagaaaaaatcaaggaaaaaatagaaaacggatcaaaatgctacgaaaatctaaataaaatagggtataacgttttaaaaattttgggtgagtaa

SEQ ID NO: 253 - protein, 362 aa, Methanococcus vannielii
MSNYLVKLTPIDRYFFGGNETFGDGKNTNYFVRSKEFPQQTSLLGMIKKEILIITGVYKEDFKEYREKELENTIGKTFKLSDSNQNHGIINSISPLFLLDNENNIYYKAPLDYGLTFVKSDGKCNFGNTEKEYLPFFENYDAKKGLPNKILSTKILSNRTDYELSEIFKEDVRIGINRKNGEEDGFYKQIFYRLKEGLSFAFVLNIDENNEHAKKFKIENDSHKNVCYIGADSSGFKLEIKEINDPSSYIMKNFTENDIQKGETSSKKFKRLLLVSDTFLKEEDYCEILNLSEFIIGETEKFRNMDTKSNKKSEKYVFLKRSSVIYSKTENSEKIKEKIENGSKCYENLNKIGYNVLKILGE

SEQ ID NO: 254 - DNA, 822 bp, Methanococcus vannielii
atggatgttaaaaaagaactatacataatagaagcaattacaaacatgcacgtaggcagcggggatgccaattttggaataatcgataaaacagtgcaaagagatgttttaacgggttttccagcaatatattcttcaagtttaaaaggttcgttaagagattactttgttggtttaaaatctgaaaaaactggcataaatgaccttataatcgatcatatttttggaaaagaagggaacaatgaaaacggaagtattcaaggaaaatataaatttttcgaagcaaaacttcttggacttcctgttagaagcaataaaagaccatatttaattgcaacgtgtccacaaattttaaatgattttttagaatctgcaaaaattttcgcatctgaattatctaatgaaataagtgatttaggaactattgatttattgaacggggaaatttttgttaatggcaaaattgatgacgaaattatcgaaggacataaagttgaatcgagtgcaaatttatgggagaatttagagaaacttcttgggaatgattttgtaatatttagcaatgaaaaatttatggaaatatgtgctgaacttccggtaattgcaagaaacaaacttgacaatggcgaaagtaaaaacctatggtacgaagagataattccaagaaaaacaaaattttattttggcgttgatctcggtagtggtgagtacaacaataaatttacaaaaaatatcgatgataaaattgttcaaattggcggaaatgcaacaattggttatggatttgctaaattagagaacttaagtaaagtattgaaataa

SEQ ID NO: 255 - protein, 273 aa, Methanococcus vannielii
MDVKKELYIIEAITNMHVGSGDANFGIIDKTVQRDVLTGFPAIYSSSLKGSLRDYFVGLKSEKTGINDLIIDHIFGKEGNNENGSIQGKYKFFEAKLLGLPVRSNKRPYLIATCPQILNDFLESAKIFASELSNEISDLGTIDLLNGEIFVNGKIDDEIIEGHKVESSANLWENLEKLLGNDFVIFSNEKFMEICAELPVIARNKLDNGESKNLWYEEIIPRKTKFYFGVDLGSGEYNNKFTKNIDDKIVQIGGNATIGYGFAKLENLSKVLK

SEQ ID NO: 256 - DNA, 390 bp, Methanococcus vannielii
atgggtaaaaaagaaattgaaaaatatattccacaagcacttcaacttataggtgaacacatcgcttcaaacggaaaggtagataatgaatattctggttatatttcatcatttggagcttcaataatccagtcaggattaattcccgcagttgctttttacagccagcctggaaaagaaggtaatgtcaaagataatagaaataaattaatgaatgttatttactgtctaatccatgaaaaagataattgtgacaataaacttttgaatgacgttatttcgggtacagtatctaaagaagaagtacttgatgctgcaatagcaacaaaacttgcactcaggacatttgaacgtgttgaacctaaaaaaggcgaaaacaatgacaaatga

SEQ ID NO: 257 - protein, 129 aa, Methanococcus vannielii
MGKKEIEKYIPQALQLIGEHIASNGKVDNEYSGYISSFGASIIQSGLIPAVAFYSQPGKEGNVKDNRNKLMNVIYCLIHEKDNCDNKLLNDVISGTVSKEEVLDAAIATKLALRTFERVEPKKGENNDK

SEQ ID NO: 258 - DNA, 1005 bp, Methanococcus vannielii
atgacaaatgattcaaactacgtcggaaacattggttattactaccaaaaactccaatttttaggaaacgaaggggaaaagaaagaatggggagagatttcaaaaggaaaagataatcgggataaaatcgaaacgttgaaaaaagaaatcgaaacaaacgaggaaaaacttaaaaaaatttcatttcattttgaaaatgaaaagatattgaactataaaccagaacacaataactacgacttaaaggaaataaaaattgaacgattaatatttaaaacaacttatcctggacttttggttggttcaggtttaaaccatgaagtgggtgcagatgaatttaaactcggattttcatttgattacacgtcaggacttccagtaatcccaggatcatcagtaaagggggttttgagaagtgcatttccaaatgacgaaaaagatcctaaatttcaatacataaaagataagttagccacctttggagtaaattctgaagatattaacgttttagaattaaaaaaagaaatatttgatggaataaaagaagaaaatggcgataagaatattcgatttaatgaaagagatatattttttgatgccgttttaaccgataataacaatgataaacatatatttggggaagactatatcacaccgcattctgatccactaaaaaacccaattcccgtgaaatttttgaaaattttacctgaaattgaatttgaattcagatttttattaaatgacagtaaagtaaatgataaaataactgcaaacgttaaaaaagaattatttaagcagattttatgtgatctgggagttggtgcaaaaactaacgttggatacggaaatctgatttccacaaatttgtcttcgaaaaatttggacaaaaaaacagaaaaaagtgccgataaaaaaacagcccctgaaaaagcaggtgccgatgaaacctcatggcaagatgaatatacgaaaaagaccggaaaaaaagttaaaaataaataa

SEQ ID NO: 259 - protein, 334 aa, Methanococcus vannielii
MTNDSNYVGNIGYYYQKLQFLGNEGEKKEWGEISKGKDNRDKIETLKKEIETNEEKLKKISFHFENEKILNYKPEHNNYDLKEIKIERLIFKTTYPGLLVGSGLNHEVGADEFKLGFSFDYTSGLPVIPGSSVKGVLRSAFPNDEKDPKFQYIKDKLATFGVNSEDINVLELKKEIFDGIKEENGDKNIRFNERDIFFDAVLTDNNNDKHIFGEDYITPHSDPLKNPIPVKFLKILPEIEFEFRFLLNDSKVNDKITANVKKELFKQILCDLGVGAKTNVGYGNLISTNLSSKNLDKKTEKSADKKTAPEKAGADETSWQDEYTKKTGKKVKNK

SEQ ID NO: 260 - DNA, 37 bp, Methanosarcina barkeri
attcgtgagcaagatccactaaaacaaggattgaaac

SEQ ID NO: 261 - DNA, 1101 bp, Methanosarcina barkeri
atgatggaacctgaacccattgtaattgaaactcttactccaatatggacaggtggagtaaatgggagtccggacacagtaagagaaacaggcattattggtagtatgcgttggtggtatgaggcaatagtaagaggaatcggaaaatatgcttgcaatccattaagtgatagcaaatgtatgcttgatgggaaggaaaaagagaatgacagaaataataaactgtgcccagcatgttatctttttggatgtggaggatggaaaagaagatttcgattagaaatagaagattttggtgtaaaagaaccttttcacttagttacactcgataaagatgaagttgggaataactggtggctatcaacaatattcaaaaaaaattttaataataacctttcttttggaaaatttacgtttagaatttatccagtcggtagaggtgacaaatcggaaataatcgcacagatcaaagcattactttccataatgtcccatgttggtgctattggtgccaaaagtcagtatggttttggtcagtttgaaatggaaaataggatggattttaaacgagccctaaatgagataaataatttttgtaacaaagatgagttcaaaaaagaagcaaacaaaccagacttctactctttatctaatttttggtgttacgagtttaaaattcctgtaagaaaccagttagttcaaagttttcagaaatcgtacattgttggaaatcagtcctcgttcacaagttatctgcctgtatctttcgatatcaggtacaaacttccaaatcgtaataaaggttcaggattgagacaggcatattattctcatcgtaatggagataaaaaccaagtttgtcaaatatttggcacacttcctgagaacaaaaaaaaggaagatggaattggaagtagaatttttgtaagtcatctatttagagaaccttcagaaagtgattatttcttacgcatttgggggttcactgaaaaaattgtgggtaacttagtcagtatagagattaataaaatgttttctctccaagaagctccaagaaggaaatacgaagaggaaataactaatttttcagggggtgcctaa

SEQ ID NO: 262 - protein, 366 aa, Methanosarcina barkeri
MMEPEPIVIETLTPIWTGGVNGSPDTVRETGIIGSMRWWYEAIVRGIGKYACNPLSDSKCMLDGKEKENDRNNKLCPACYLFGCGGWKRRFRLEIEDFGVKEPFHLVTLDKDEVGNNWWLSTIFKKNFNNNLSFGKFTFRIYPVGRGDKSEIIAQIKALLSIMSHVGAIGAKSQYGFGQFEMENRMDFKRALNEINNFCNKDEFKKEANKPDFYSLSNFWCYEFKIPVRNQLVQSFQKSYIVGNQSSFTSYLPVSFDIRYKLPNRNKGSGLRQAYYSHRNGDKNQVCQIFGTLPENKKKEDGIGSRIFVSHLFREPSESDYFLRIWGFTEKIVGNLVSIEINKMFSLQEAPRRKYEEEITNFSGGA

SEQ ID NO: 263 - DNA, 1095 bp, Methanosarcina barkeri
atggctaccattaatcaaaaattgtcagataatttccgagaagtatggcagaaacagaatttgaaagttaatttagaagaagttatcgaaaaatgggaacttacaaaatacattaaagacaatttcatatgtccagaggtaaatatttctacgctacccagttactcctttattctcaattttatgttcaaacttaaaaagccctatatatcccttgatgaaaacgattttcacataattgataatcctctgagaaaagataaagttctacatctcccatttgtctcgccttcctcttggaaaggaagtctcagaaactctctctggcaacttaattatgattatgaaaacgataagataagacgtattttcggaaacgagagatctccaatctccgaagatatagctctaaggatgggaagactatgttttttccctactttttttaccaaaaaatcattggaaataattaatcctcatgaccgaaagcgtagagttgggacagtgccaattctaatggaaagcgttccgcaagatacaacgggtttttttacacttttatatgttccttttgacttgattggatgtgatgaaaaagagatcagaaagcaggtttcagaagatatacaattggtctcagaggggttaaaatcgatgtttacttattatggatttggagccaaaacatcaagtggatatgggacaacatatgaaaatatcacagatggtacgatcactttaagaaacaaaagtgtaaaagtttcggttcaagaagaaaaatttgagtttccaaaagattcttataaaaaattccttgatgaaaatggaattttaaaagatgaattcaggggtaaaaatggtgggcctcttagtaattcagagttaggtaattttaatggaagtcagaaggaatttaagaaattcaaaacatggtacaatgataatatcgaaaagtggcagaaatatctgaaatctcaaaatacccctacatctgaatggccaacatggagatttgaaggtttctcagaattaattgatgtttccaaaaatattgctacttctttagaatcttcgggggtacacaatgagtcctga

SEQ ID NO: 264 - protein, 364 aa, Methanosarcina barkeri
MATINQKLSDNFREVWQKQNLKVNLEEVIEKWELTKYIKDNFICPEVNISTLPSYSFILNFMFKLKKPYISLDENDFHIIDNPLRKDKVLHLPFVSPSSWKGSLRNSLWQLNYDYENDKIRRIFGNERSPISEDIALRMGRLCFFPTFFTKKSLEIINPHDRKRRVGTVPILMESVPQDTTGFFTLLYVPFDLIGCDEKEIRKQVSEDIQLVSEGLKSMFTYYGFGAKTSSGYGTTYENITDGTITLRNKSVKVSVQEEKFEFPKDSYKKFLDENGILKDEFRGKNGGPLSNSELGNFNGSQKEFKKFKTWYNDNIEKWQKYLKSQNTPTSEWPTWRFEGFSELIDVSKNIATSLESSGVHNES

SEQ ID NO: 265 - DNA, 2787 bp, Methanosarcina barkeri
atgagtcctgatctcaaaatccttgctgacaataagaaagcattacatttagctgagattgctgcttggttgcatgacatgagaaagtgtagtgataaatttttgatcgggaattctttggatcgccaattagactctactgaaaagaacagtgaagttacccattttcttaaagatataaagaccagatttaagaaaatcgaaattgatttttctgaagtaaatcctattttcgaaaaagtaacgttaaataagcttattgaaaaaggccggcctgaaactctaaaaaaagaaaatctgcaaaaaaaatatccttggattgtaaaggccttaggtcgttgtcatggtgcagcacatattgaaaaagaaaatgtttctgaagaattatttaagcaatacaaagattacacaatgatcagcaatccatttggatttgaaaaaggaatagaagagcttactcctaaattaacaagcattccatatgataaaataaatgatagatctttttttgtaaagtcattagttgaatcctttgattatgcactaggggaaaccagaagacctacaaatgaggttacacttactgattggtcaggtattgttgctgcgttatataaatctgctttagcgggttcattgcttctgggagaaaaaacagatcctctaaatctaaagtggcaatttttagtaataaagtttaattccgagcagatatggggaaatgctcaaaatataccaatattagcaacaagaaaagaaatgttaacaaagggattagatagggtgaaagttctacttgaagaaaaatatccattagggaacgaagtatatcgagatcaaaataacagtctgtatgttgtacccagtattccaaatctattggagtatacaatttctgaagaaagtaaaacacaactaaagcaattaatagcaaatgaatttgcagttgatgaagaacataacttcggatttaaaggcgaagtcattctcactactgacattgataatcaagcatggtgtgggcaagaaccgaataatgaagataaagaaaagaacgaaattccacctatagcacgaattctctctaatgatgaactttgctctccagcagatgttaatgcggttgagaatttttggaaagatgtttctgattgtgggatatgtactatctcttggttacgtcctcaggggcccacttcaaagggatttaacagaaaagcttcagattgctgggtcaagagggtaacttggagagcgagtgagtggtatcatagtctcgataacacaatatggattgatgaggttgctgattcaaacggtagaatttgcctactaactggcagattagacctcttagaatggctaaaaccagacgggtatatttctaccataaaggtaggatctgacgcaaatggcaaagtcattccaaaaactccatcttttgctcgtatgcacaggatttggagaacaactaagaaattctgggaagatgcaaaggaagatttagcgaaaaaaataggtcgtgttgacaatagactgaagatttttggaaattttcaatctgaaaataataattcccttaaaagagatcattcttataaagctatgttagacagaatcggtttcagcattttttgtggtagaaataatgaatttcttataatcgagaacctaacggaattagctaataaatttgattttgattcaggaaaatctactgataaaagccctacagaatatcttaaaaaatatctttctaataaaaaagttaaaatctatgactctgagggaaaaaaacgcttaaatccgataggatgcttgaaaatactaaaaattgacgaagaaaacacttcttatgttcctgtaattcctatattagctgaaccaagtatatttatgactattattccagcagataaagctcttgaagcatccatactaataaaaacaaaatacgaagaggaaatgggtaaagtaaggaatcgtttgcctttaagtcttgggatggtatttgctaagtcacacactcccctagcagctttaatggatgcaggccgcaggatgctgcgcaaatcaaataaagatagatcagtgaatgaggataaatggatattggaagaagatccaattgaaaacgataataaattcactcttaaatttaacaatggaacaaagtgggaaattagttcaaaaatgggggatgaaataactactgattactggtacccctatttttatgctcagggaaattttcaggaacgatctaactcctttatgcattcctttagaaattatgagaatttcaatagatggctgattcatgttagtgagttaaaaaaaggagatacagtaagtattttgccttctaaatttgatttcgaatttctagattcagcttcccgcagatttgaaatttgttacgatgaaaaaggatatagaagagacagtttgaaagctctaagaccatatcttcttgaagaacttgataatttcacttatttatgggatctatgctccaaaaatttatcaaatacgcagataaaaaatgtaattactcttgttgaaaaaaaaagggaagagtgggctgttggggaagatacaactgtttttgaaacttttgttcatgatgttctttacaatgcaaactggaacaatggaagaagaccagatgatgcaaaaatgagtgaattagaagatgcagcaaagtctggaaaattgagggatattttggagttatacatgaatattttaaaatatagagcagaggaaccttttggaggaatttga

SEQ ID NO: 266 - protein, 928 aa, Methanosarcina barkeri
MSPDLKILADNKKALHLAEIAAWLHDMRKCSDKFLIGNSLDRQLDSTEKNSEVTHFLKDIKTRFKKIEIDFSEVNPIFEKVTLNKLIEKGRPETLKKENLQKKYPWIVKALGRCHGAAHIEKENVSEELFKQYKDYTMISNPFGFEKGIEELTPKLTSIPYDKINDRSFFVKSLVESFDYALGETRRPTNEVTLTDWSGIVAALYKSALAGSLLLGEKTDPLNLKWQFLVIKFNSEQIWGNAQNIPILATRKEMLTKGLDRVKVLLEEKYPLGNEVYRDQNNSLYVVPSIPNLLEYTISEESKTQLKQLIANEFAVDEEHNFGFKGEVILTTDIDNQAWCGQEPNNEDKEKNEIPPIARILSNDELCSPADVNAVENFWKDVSDCGICTISWLRPQGPTSKGFNRKASDCWVKRVTWRASEWYHSLDNTIWIDEVADSNGRICLLTGRLDLLEWLKPDGYISTIKVGSDANGKVIPKTPSFARMHRIWRTTKKFWEDAKEDLAKKIGRVDNRLKIFGNFQSENNNSLKRDHSYKAMLDRIGFSIFCGRNNEFLIIENLTELANKFDFDSGKSTDKSPTEYLKKYLSNKKVKIYDSEGKKRLNPIGCLKILKIDEENTSYVPVIPILAEPSIFMTIIPADKALEASILIKTKYEEEMGKVRNRLPLSLGMVFAKSHTPLAALMDAGRRMLRKSNKDRSVNEDKWILEEDPIENDNKFTLKFNNGTKWEISSKMGDEITTDYWYPYFYAQGNFQERSNSFMHSFRNYENFNRWLIHVSELKKGDTVSILPSKFDFEFLDSASRRFEICYDEKGYRRDSLKALRPYLLEELDNFTYLWDLCSKNLSNTQIKNVITLVEKKREEWAVGEDTTVFETFVHDVLYNANWNNGRRPDDAKMSELEDAAKSGKLRDILELYMNILKYRAEEPFGGI

SEQ ID NO: 267 - DNA, 966 bp, Methanosarcina barkeri
atgggtaaatcaaacaaactttatactcaacaactttatctattcatggcactggaccctgttcatataggtactggacaatcccaacttggaagagttgataacacaatagttagggagcctggaacaaatcttccaaaaattccaggaacaagtttaatgggagcagcgcgtcactatgcctcaatgaaatatgggaaaccagaagcagctggccagcataaaaatttaaaggcaaaagacccaaaaaaatgtccaataatctatacatttggtacatatacagaaaccgaggggggtcagcaaggtaaaattagcattagtgatgcacaaattttgctatttccagtaaattctattgcaggacctctatgggttagtacaaaagaagttcttgaaattgccggattttctataccagatactgttgagctttctgatgaaagcgtatttacttctgtgaattgggaaaaagacacattaaatcttgggtggctttcactgaaagcggttaccggattaaaaataactcctccagatgtcattaaagaaaacaataaatggaattctatagctaaccgactttcaattgtatcttccaagttattttctcaaatcgtcaacagtaaccttgaagttcgtacttcggtcgccataaatccagaaactggagcagctgaagataaagctttgtttacttatgaagcaatccctagaacgacttggttattttttgatgtagtacaagacgattatatgagtaagtttcctgtaactgacaaacaattcaaaggcgaaacagaaaacatcggtgattcacttggagaaacttgggactcgccaatggatgttttgaacgcaggctttcatttgatagagtatctgggtatcggtggaatgattaccagaggatttgggaggatgaaacaaatatgttcctgggaggtttgtgagaatgaatcttga

SEQ ID NO: 268 - protein, 321 aa, Methanosarcina barkeri
MGKSNKLYTQQLYLFMALDPVHIGTGQSQLGRVDNTIVREPGTNLPKIPGTSLMGAARHYASMKYGKPEAAGQHKNLKAKDPKKCPIIYTFGTYTETEGGQQGKISISDAQILLFPVNSIAGPLWVSTKEVLEIAGFSIPDTVELSDESVFTSVNWEKDTLNLGWLSLKAVTGLKITPPDVIKENNKWNSIANRLSIVSSKLFSQIVNSNLEVRTSVAINPETGAAEDKALFTYEAIPRTTWLFFDVVQDDYMSKFPVTDKQFKGETENIGDSLGETWDSPMDVLNAGFHLIEYLGIGGMITRGFGRMKQICSWEVCENES

SEQ ID NO: 269 - DNA, 37 bp, Methanosarcina mazei; identical to SEQ ID NO: 260

SEQ ID NO: 270 - DNA, 948 bp, Methanosarcina mazei
atgagtggatcacacaaactttatactcaacaacgctacctattcatggcactggaccccgttcatataggtactggacaatcccagcttggaagagttgataatacgatagtcagagaacctggaacaaatatcccaaaaattccaggaacaagtttaatgggagcagcacgtcactatgcctctatgaaatatggaaaattagaagcagctggtcagcataaaacactaaagggaaaaaatcatgaaaaatgtccaataatctatacattcggcacatatacagaaacagaagggggccagcaaggtaaaattagcataagcgatgcacaaatcttattatttccagtgaattctattgcaggtcctttgtgggttagtacaaaagagattcttgaaactgcaggattttctatacaagatactgttgagattttcgatgaaaatgtgtttacttctatgaattgggaaaaagacactttaaatcttgggtggctctcactgaaagcaattactgggttaaatgtagttcctcctcatactattaaagaaaaagatgaatggaattccatagcaagcagactttcaattgtatctcctaaattattttctcaaatcgtaaatagtaatcttgaagttcgtacttcggttgccataaaaccagaaactggaacagctgaagataaagctttgtttacttatgaagcaatccctagaactacttggttattttttgatgtagtacaggatgattataaaaatgagttcccaccaactgaaaaacagtataaagatggagataatgaaggtgattcacttggggaagtttggaactcacctattgatgttttaaacgcgggttttcatttaatagagtatctgggtattgggggaatggttaccagaggatttggaagaatgaaaaaaatgtatgcctgggaggtttga

SEQ ID NO: 271 - protein, 315 aa, Methanosarcina mazei
MSGSHKLYTQQRYLFMALDPVHIGTGQSQLGRVDNTIVREPGTNIPKIPGTSLMGAARHYASMKYGKLEAAGQHKTLKGKNHEKCPIIYTFGTYTETEGGQQGKISISDAQILLFPVNSIAGPLWVSTKEILETAGFSIQDTVEIFDENVFTSMNWEKDTLNLGWLSLKAITGLNVVPPHTIKEKDEWNSIASRLSIVSPKLFSQIVNSNLEVRTSVAIKPETGTAEDKALFTYEAIPRTTWLFFDVVQDDYKNEFPPTEKQYKDGDNEGDSLGEVWNSPIDVLNAGFHLIEYLGIGGMVTRGFGRMKKMYAWEV

SEQ ID NO: 272 - DNA, 2763 bp, Methanosarcina mazei
atgagtgctgatctaaaagttcttgctgacaataaagccaacctactcttagcagaggttgctgcttggttgcatgatatgggaaaatgcagtgataaatttgtaataagtagttcttgtgacaaaccatcaggtttcgagtataaatcaaaagaagattatttgtcaaactttaatgaaaataataacgagattaaatctatttttgaaaacacatttgttgatttttctaaagttaatttcatcaatgagaaagttaccctaaatgatcttattgtaaaaggtcttccgaggacaaataaagagaaagaaaaagataaatttccttggttggtaagaacattagggcgttgtcatggtgcagcacatattgaaaaagaggattctaaagaatttaaacaatataaaaattatacaatgatcagcaatccatttggatttgaaaaaggaatggaaggactttcctcaaaattaataactattccgtataacaaaataaatgaccgatctttttttgtcaagtcagtagttgaatcttttaactacgcattaggtgatactagaagaccaacaaatgaagttacacttactgattggtcaggtattgttgctgcgttatataaatctgctttagctagtgcattgctcctaaagataaaaacagatccaactgaactgaagtggagatttttatcaatcaggtttaattcagaacagatatggggaaacgctcaaaatataccaatattagcaacaagaaaaaaaatgctaacggagggattggaccgagtaaaacttcttcttgaagaaacttacccattaggaaacgaaatatatcgagatgaagacaacagtatattcgttgtacctgatatctcctatttactggacaaaacatctgaaaaaaatgaaccgctaaaacaattaatagcaaatgaatttggatttgaaggtgaggtcgttatcactcctgaaattggtaatgaatggtgggcacaaaaaccagatcgagaaaatgagatgcaaaacgatgaaatccctcctatagcaaaaatcctttctaatcaaagactttactctccagcagatcccaaagatgttgcaaaattttgggaaggaacttcaaatagaggaatttgtaccatctcttggttacgtcctcaaggacccacttcaaagggatttaacagaaaagcttcagattgctgggtcgagagagtaacttggagagcgaatgagtggtatcatagtcttgatagtactatatggattgatgaggttgctgattcaaacgacagaatctgcttattaaccggcagattcgatcttttagaatggctaaaaccagatgggtatatttctaccataaagataagatctgaaccaaatggcaaagttattacaaaaactccatcttttgctcgtatgaacaggatttggagaacaaccaaaaaattctgggaagatgtagagaatgagctaggagtaaaaataggtcagattgacaataggttgaagattattggaaaatttcaacctgagaataacagttcccttaaaatgggtcattcttataaagctatgttagatagaatcggtttcagtattttttatggaaaagaggatgaatttctagtaatcgagaaccacaaagaactagcaaataaatttggttttgattcagaaaaatatgttgataaaaatcctactaggcaacttaaagaatatttatccactaaaaaagttaaaatttacgattcagagggaaaaaaccgatcaaatcccattggcaccttagaaatattagaaatgaaagaagaggatactccttacgttcctttaattcctatactaactgaaccgagcatattcatggctataattccagcagaaaaagctcttgacgtatccagactaataaaaataaaatatgaaacggaaatggggaaagtaaggaatcgtttacctttaagccttgggatggtatttgctaagtctcacactcctttagcagctttaatggatgcaggtcggaagatgctgcgaaaatcaaacaaagaaaagtcagctaaagaggataaatggatactggaagaaaatccaattaaaaactataattcattcactcttaaatttaacaatgggataaaatggaaaatcccttcaataatgggagatgaaaaaactctcgatatttggtatccctatttttatgttgatggagagctccgtaatcgttctgactcctttatacattcctttaaaaatcctgaaaattcagatagatggttagttcatgttagtgaattaaaagaaggagatatagtagggattttgccttcgaaattcgatttcgaatttttggattcagcttctcgcagatttgagatctgttatgatgagaaagggaatcgtaggggcagtctaaaagctctaagaccttatcttcttgaagaacttgataatttcactgatttatggaatatatgctccaagaacttatcaaatactcagataagaaatataatcactcttattgagaaaaaaagagaagaatgggacatcggggaagatacaattgtttttgaaaattttgttcatgatgtcctctataatgcaaactggaacaatggaaaaagaccagatgacgcaaaaatgactgaactggaggatgcggcaaagtctggtaaattaagggatattttagagttaaatctgaatattttaaaaaatagagctgaggaagcttctggaggaatttga

SEQ ID NO: 273 - protein, 920 aa, Methanosarcina mazei
MSADLKVLADNKANLLLAEVAAWLHDMGKCSDKFVISSSCDKPSGFEYKSKEDYLSNFNENNNEIKSIFENTFVDFSKVNFINEKVTLNDLIVKGLPRTNKEKEKDKFPWLVRTLGRCHGAAHIEKEDSKEFKQYKNYTMISNPFGFEKGMEGLSSKLITIPYNKINDRSFFVKSVVESFNYALGDTRRPTNEVTLTDWSGIVAALYKSALASALLLKIKTDPTELKWRFLSIRFNSEQIWGNAQNIPILATRKKMLTEGLDRVKLLLEETYPLGNEIYRDEDNSIFVVPDISYLLDKTSEKNEPLKQLIANEFGFEGEVVITPEIGNEWWAQKPDRENEMQNDEIPPIAKILSNQRLYSPADPKDVAKFWEGTSNRGICTISWLRPQGPTSKGFNRKASDCWVERVTWRANEWYHSLDSTIWIDEVADSNDRICLLTGRFDLLEWLKPDGYISTIKIRSEPNGKVITKTPSFARMNRIWRTTKKFWEDVENELGVKIGQIDNRLKIIGKFQPENNSSLKMGHSYKAMLDRIGFSIFYGKEDEFLVIENHKELANKFGFDSEKYVDKNPTRQLKEYLSTKKVKIYDSEGKNRSNPIGTLEILEMKEEDTPYVPLIPILTEPSIFMAIIPAEKALDVSRLIKIKYETEMGKVRNRLPLSLGMVFAKSHTPLAALMDAGRKMLRKSNKEKSAKEDKWILEENPIKNYNSFTLKFNNGIKWKIPSIMGDEKTLDIWYPYFYVDGELRNRSDSFIHSFKNPENSDRWLVHVSELKEGDIVGILPSKFDFEFLDSASRRFEICYDEKGNRRGSLKALRPYLLEELDNFTDLWNICSKNLSNTQIRNIITLIEKKREEWDIGEDTIVFENFVHDVLYNANWNNGKRPDDAKMTELEDAAKSGKLRDILELNLNILKNRAEEASGGI

SEQ ID NO: 274 - DNA, 1293 bp, Methanosarcina mazei
atgaacattgattggggttcggttctttatcaacaggaagaagcctccataaatgatctcaaaataattgttgaggaactcgatcaggcagaaaaggaagaaacagaagaattagaaaaaaagttagagaccaaacttaaggatctaattttgcctaatgaacatctagcttatcattacatgtctaccattaatcaaaaactgtcagataatttccgagaagcatggcagaaacagaacctggaagttaatttagaagaagttatcgaaaaatgggaacttacaaaatatgttaaagacaatttcatatgtccagaggtaaatatttctacattacccagctactcttttgttctcaaatttatgttcaaacttaaaaagccctatatatctcttgatgaaaatgatttttacattattgataatcctttgaggaaagataaagttttaaaccttccatttgtcgcaccttcttcttggaaaggaagtctcaggaactctctctggcaacttaattatgattatgaaaacgataagataagacgtattttcggaaacgagagatctccaaactccgaagatatagttctaaggatgggaagactgtattttttccctacatttttttccaaaaaatcattggaaataattaatcctcataaccgagagagtagagttggtacagtgccgattctaatggaaagcgttccgcaagatacaacgggatatttcactcttatctatgttccttttgacttgattggatgtgaggaaaacgagataaaaaaacaggttgcatgcgatatacaattgatttcaaagggattaaaatcgatgtttacttattatggattcggagccaaaacatcaagtggatacgggacatcatacgaagatattacagatggtacgatcactttaagggttaaaggaatagaagtttctctaaaagatatagatgaagtaaaacctcctgctgaaggctatagtaaatatcttaacgaagatggcagtgtcaaggaagagtttaaaggatctggaaaatatggacttctaagtgataaagaatattacaaaataaaaaaccagctcgaaggaagtagaaatgagtatagagatttcagacaatggtatgggttaaatggagaaaagtggcaaaaacacttaaactcttttaaatatccaaaacctgaatggccaacttggaacttcggaaatttcttccagttaatcgaggtctccaaaaatattgctacctctttagaactttcgggggctcacaatgagtgctga

SEQ ID NO: 275 - protein, 430 aa, Methanosarcina mazei
MNIDWGSVLYQQEEASINDLKIIVEELDQAEKEETEELEKKLETKLKDLILPNEHLAYHYMSTINQKLSDNFREAWQKQNLEVNLEEVIEKWELTKYVKDNFICPEVNISTLPSYSFVLKFMFKLKKPYISLDENDFYIIDNPLRKDKVLNLPFVAPSSWKGSLRNSLWQLNYDYENDKIRRIFGNERSPNSEDIVLRMGRLYFFPTFFSKKSLEIINPHNRESRVGTVPILMESVPQDTTGYFTLIYVPFDLIGCEENEIKKQVACDIQLISKGLKSMFTYYGFGAKTSSGYGTSYEDITDGTITLRVKGIEVSLKDIDEVKPPAEGYSKYLNEDGSVKEEFKGSGKYGLLSDKEYYKIKNQLEGSRNEYRDFRQWYGLNGEKWQKHLNSFKYPKPEWPTWNFGNFFQLIEVSKNIATSLELSGAHNEC

SEQ ID NO: 276 - DNA, 1101 bp, Methanosarcina mazei
atgatggaacctgaacccattgtaattgaaactcttactccaatatggacaggtggagtaaacgggaattcggatacagtcagagaaacaggcgttatcggtagcatgcgttggtggtatgaggcaataataagaggaataggagaatacgcttgtgatccattaagtgatagtaaatgtatgcttgatgggaaggaaaaagcagatgaaagaaacaaaaaactgtgcccagcatgttatctttttggatgtgggggatggaaaagaagatttcgactagaaatagtgaactgtagtgtgaaagaatcttttcatttagttacacttgatagaaaagggattggaaataactggtggctatcaacaatattcgaaaaaaatcttaataatagcctttcttttggaacatttacttttaaaatatatccagttggcagagacgacaaatcagaaataatcacacagataaaagcattactttccataatgtcccatgttggtgctattggtgccaaaagtcaatatggttttggtcagtttgaaatggaaaataggatggattttaaacgagccataaacgagataaaaaatttctctaacaaagatgagttcaaaaaagaagtaaacaaaccagactgctactctttatcaaatttttggtgttacgagtttaaaattcctgcaagaaaccagttagtccaaaattttcagaaatcgaacaacgttggaaataaatcttcgtccacaagttatctgcctgtatctttcgatatcaggtacaaacttccaaatcgcaataaaggttcaggattgagacaggcgtattattctcattgtaacggagataaaaaccaagtttataaaatatttggtacgcttcctaagaacgagaaaaaggaaaatggaattggaagtcgaatttttgtaagtcatttatttagaaaaacttcagaaagtaattatttcttacacgtttggggttttactgaaaaagatgtgggtgaccttgtgagtagggagattcaaaaaatgttttctcttgatgaagttccaaaaatgaaatatgaagaggaaatcaataatttttcagggggtgcctaa

SEQ ID NO: 277 - protein, 366 aa, Methanosarcina mazei
MMEPEPIVIETLTPIWTGGVNGNSDTVRETGVIGSMRWWYEAIIRGIGEYACDPLSDSKCMLDGKEKADERNKKLCPACYLFGCGGWKRRFRLEIVNCSVKESFHLVTLDRKGIGNNWWLSTIFEKNLNNSLSFGTFTFKIYPVGRDDKSEIITQIKALLSIMSHVGAIGAKSQYGFGQFEMENRMDFKRAINEIKNFSNKDEFKKEVNKPDCYSLSNFWCYEFKIPARNQLVQNFQKSNNVGNKSSSTSYLPVSFDIRYKLPNRNKGSGLRQAYYSHCNGDKNQVYKIFGTLPKNEKKENGIGSRIFVSHLFRKTSESNYFLHVWGFTEKDVGDLVSREIQKMFSLDEVPKMKYEEEINNFSGGA

SEQ ID NO: 278 - DNA, 35 bp, Nostoc sp
gttttaattcctttacccctcacggggatggaaac

SEQ ID NO: 279 - DNA, 927 bp, Nostoc sp
atgtttgaaatctttaaaaatcgtctagaaattatcggtatccttgaaactgttacagctttgagaatcagtgctggacgttctacagaaccaattggctcagatttgccagttattaaagatgcttttggtagaccattaatccccggttcgagtttaaaaggtgcattacgttcacggctggaaagttttttgcggggaattcatcatgattttgctgctaacccagcccaggaaacagaatggtcaattcctccagatgaaatggctagtgttaaagagcgtatcaaaaatttaaccccacaggaaaaagaagctcaattacacgaatatattatcaacaacactgacttagtttcttcactatttggttctccctggctggctagtaaattccaaattcgtgatttaacagttagtaaacctgacgataattggtttggtcagtatcaagaacgtgatggtgttgcgattgatagagatacagaaactgctggtgatggcaaactttatgactttcaagttgtaccagccgggactccttttatatttcatgcagtgattgaaaatgccgcagaatgggaattaggaatgttaatgattggcttgcaccaatttcaaacagaacaaattccccttggtggcggacgttctcgcggcttaggagttgtcaagctgataattgaggatatgaaatgggtcgatgttcgagatgaaaattacaaacgagataagaattacaaaccgcaaacagacccaaaaaaagtacaagactatctcaaatctttgattaataatagttctaattccacttcttctgatattgattctcaatctttaaaacaagcttgggctgacgcttttattaatcatcttgctagcgaacttcaaaaacgcactaacactacagcaacttcttctcactag

SEQ ID NO: 280 - protein, 308 aa, Nostoc sp
MFEIFKNRLEIIGILETVTALRISAGRSTEPIGSDLPVIKDAFGRPLIPGSSLKGALRSRLESFLRGIHHDFAANPAQETEWSIPPDEMASVKERIKNLTPQEKEAQLHEYIINNTDLVSSLFGSPWLASKFQIRDLTVSKPDDNWFGQYQERDGVAIDRDTETAGDGKLYDFQVVPAGTPFIFHAVIENAAEWELGMLMIGLHQFQTEQIPLGGGRSRGLGVVKLIIEDMKWVDVRDENYKRDKNYKPQTDPKKVQDYLKSLINNSSNSTSSDIDSQSLKQAWADAFINHLASELQKRTNTTATSSH

SEQ ID NO: 281 - DNA, 456 bp, Nostoc sp
atgacagatttgactgaacagcaacagcaaagagagatacaacaaaaagaactcaaaattcaaaaagaaattcgtcaaatcgaagatgatttagttatagctattgagacaattttaaaagataaagattcatgtaaaaacttagaagaatctcaatatcgtaatttaatgcacgttgcagatacaacagaaagtattgcagtcatcaagaattttttgcgctaccagttaggtcgtgataaaaagtggggcgtaggagaaaattcaattgcccaaagaattattaatgatattgatactttacttcaagagaaagcaaaaacaattgtcgaagaagtaaagtatatggaaaaatttaaacctgtttggttagaattaacccgccgttatcttggctatggttctcgtcgtctcaagtacattaatgccaataaagataataaatatgaaagttaa

SEQ ID NO: 282 - protein, 151 aa, Nostoc sp
MTDLTEQQQQREIQQKELKIQKEIRQIEDDLVIAIETILKDKDSCKNLEESQYRNLMHVADTTESIAVIKNFLRYQLGRDKKWGVGENSIAQRIINDIDTLLQEKAKTIVEEVKYMEKFKPVWLELTRRYLGYGSRRLKYINANKDNKYES

SEQ ID NO: 283 - DNA, 1305 bp, Nostoc sp
atgaagcgaattgaactgaccatcaaagcattgtcacccttggcaattggtaaacaaaaacccggcggttctatcaacgaggcggaacgatatattccaggttcagtgttgcgtggtgcgatcgctaaacatatcctacaacgtgctggccgggaactggaaaatctggcaactaacggcggtgatttcgcagacttatttttagcggaaaatccagctatctttcaaaatgcctaccccgcagttgctaaagtggggagtaagcatcaagtagtagataacaatatcaaagttttacctgcaactgctgttagttccaaagccaatcctggttttttacccaagggacatggtgtatttgatacattaattgactcgttttgtgccgaacaattccagcattcttatgaccccagtagtttgaaagcattagaacaaggggtagacccgcgagttgaaacctacaattctttgtatagcaaacataacgagcaatactgtactcatgcggctacaagtcgtttgttaacacgggtgggcattaatcgttatcgtgctacatctagcgatgatattttatacagtatcgaagttctcaacgaagcctttatagttgccaatgagggtaaaaatcaggaatgggataattacgtttatcgcggttatattaacgtttctaatgatgaattagccacaaaactcactaattttatcaacaataactctgaagtttttcgacttggtgggtcagtatctcgtgggctgggtaaagttgaaattactgctaaagaaattccggtagctgatgatatttctagtcggattcatgtatttaatcaagcattacataaacgctggcaagattggtctgaagcatttggcgatgggctacgccccgctaaaagcgatcgcacacctaacccaactagtaaacgcactttttttacacttaacttgcattctgatgtaattttaactgaagattggcagcgtactacagtaatttcgccagaaatgcttcagcagtttgcagatgtggaagaccctagcttaaaactccacacagcttacagtagttatagttacacttctggttggaatagtgcttggggtttgatgaaagatgttgaacttgtcaccaataaagggtcagtttatttattcagcactgaaaatcgacagttgtgggaggatgcactttctagtttagagttgcggggtgtaggcgatcgcacctgtgaaggttttggacaagtagaaatttgcaacgagtttcatcaaatatttcgggagaatccagtatga

SEQ ID NO: 284 - protein, 434 aa, Nostoc sp
MKRIELTIKALSPLAIGKQKPGGSINEAERYIPGSVLRGAIAKHILQRAGRELENLATNGGDFADLFLAENPAIFQNAYPAVAKVGSKHQVVDNNIKVLPATAVSSKANPGFLPKGHGVFDTLIDSFCAEQFQHSYDPSSLKALEQGVDPRVETYNSLYSKHNEQYCTHAATSRLLTRVGINRYRATSSDDILYSIEVLNEAFIVANEGKNQEWDNYVYRGYINVSNDELATKLTNFINNNSEVFRLGGSVSRGLGKVEITAKEIPVADDISSRIHVFNQALHKRWQDWSEAFGDGLRPAKSDRTPNPTSKRTFFTLNLHSDVILTEDWQRTTVISPEMLQQFADVEDPSLKLHTAYSSYSYTSGWNSAWGLMKDVELVTNKGSVYLFSTENRQLWEDALSSLELRGVGDRTCEGFGQVEICNEFHQIFRENPV

SEQ ID NO: 285 - DNA, 759 bp, Nostoc sp
atgattgacctgagtacactttcccaaagagcatctgaaaactggaaaataaatgcaattattgatacagctttatgtgttggtgctggtggttcatctggttcgctggcagataaacccattgtccgcaacgcccaacgacaacttttaatccccggttctcaaattaaaggtaggctgcgccatgaatgtgaaaaacttgcacgggcgttaggttggcagattttttatgcacccgtagccacagaactttgtccaaatcaaggccaagtgtctagccaatttcaaaaaatttatcaagttagcggctataaaggctaccactgcgttgtatcgcaaatctttggcgacccaatcttaccatcccgtgtcattgtggatgattttatctgtacaacaccagttgatgaactagcagaagtttttcgtcctggtgtgactatcaaccgtcgtcgtcgcacggctgaagaaaacaaactctatttattagaaacgtcgcctgcaaatgcccagttagagtttaagggtaagatttacctacagccccgctttcgttctggcagtccagacttagcaaagcctttgatttttgctgctttacgacgcatctatgctttgggaggtagtaaatcaacaggtttgggatggttgcattggcagaatttaccgactttatctgatgatgatccgatatggtcaaatttgaatgctgaggagtatctagcaaatcgtcaagtttcagttggtggtgctgcatga

SEQ ID NO: 286 - protein, 252 aa, Nostoc sp
MIDLSTLSQRASENWKINAIIDTALCVGAGGSSGSLADKPIVRNAQRQLLIPGSQIKGRLRHECEKLARALGWQIFYAPVATELCPNQGQVSSQFQKIYQVSGYKGYHCVVSQIFGDPILPSRVIVDDFICTTPVDELAEVFRPGVTINRRRRTAEENKLYLLETSPANAQLEFKGKIYLQPRFRSGSPDLAKPLIFAALRRIYALGGSKSTGLGWLHWQNLPTLSDDDPIWSNLNAEEYLANRQVSVGGAA

SEQ ID NO: 287 - DNA, 2367 bp, Nostoc sp
atgaacaattctcgcacgcgcacaattactgctttagcctggtgtctcgcttggggcgaaaggcacaatctcaatcaggatgaactcagtatattgcatcaaatagaacgggcaattaaagatgagccagacgtaccggagagtatcaaatctgttgttaaacaagcaaagcgactctatgatattcctaacgactatgaaccagaaacactggaagacttgaagaaagattatccagacctttgggatgagaagaggcgcattggtttggtatatgggggagctaccaaaatcaaacaatacgtctttgaagctgctaaacttaacgatattcgtggtgcgtcggcgttactagatcgcattaatcttgatgatattcccggtttttttggagagggcgggcgatcgcaccgaataggtaaatggctggatgagaatggattttctgacctaagacaagccttaattcccgaattgattatctattctacaggcggtagtgttcttgctttctgtcctgctgcattgactgacaaactcgccaatgcaatcgaaaaacgctacactcatgaaactttaaccgctaattcctgtgctgttggtgatactttcaggcttttagaattacgctttgggttactgcaagacccaattgaaaatacgctttggcttgaaaaatacaaacaaaaacaaagtaatcctaatcccaatcctattattcaagcttattttaaccaatcaaatgaatcggacttaaacaagaaattttggctacgcaagaattttaacgaacttgtgggaaaacttgctaaccaatttacccaccgccgtaacggaaacgcatcagcaacagcacgtcctactcgttcctttccgccaatgtttgaaactcatccatacttggaacgggatgaaactgacaatcgcgcagctgtcgccaagacgaatttaccgggaacacctagtttttcggatgctttagcacgaaaagttattgtcggacagcgcagcaaacgcgatcgccagcaacgacggcgatggtacaaaaattttagattccgcagacagtcagggaaagaagaactatggagtcccggttattttcctagttgggtgacaagatttcacaaatttttagaacaatcagaaagcgatcgccaatattatcaaatcacacaaggtgaaccagtaacagaggctttttctttacgtgaaataggtaatgtcagcaaacttcgtggttttgttggttatatctatgcagatggtaataatatgggtggctatctccgccagcacatccgcacgccagaaaaataccgcgagtttagcaaacaggttttagatgcaacgcggaacgctgtttacattgcgctagaaaaacatcttaaaccgcgccgactgaataatcttattgacccagataatgctcaccggaatggtgattggatttatccttttgaaattattacgattggtggcgatgatgttttattaatcgttcctgcggataaagctttagatgttgctaaaactattggtgaagaatttgaacgagaaatattaaaatcaccaggctttaggcttaacaaaccttatgaacccgaaaaagtccaccgctaccaaggagaaaaaccatctgagtatacatctcaatgtgaattaagtatgtcggcaggtgttttgataactgctgaaaatacacctatttactacgcacaagaactcaccgagcaacttctaaaatcatcgaagaaacttgctaaagaactcaaacgctataactattatggtggaacggttgattttttagtattaaaagccgtaaccatgattgcttcagatgtcaaagatttccgcgaacaaggattaacaaaaggtaatcttaaactatatgcttcaccttacacccttcatgaattaggagggttattacaaactgtggaagcacttaaaaaagccaaatttccgaaatcacaactatatcaaattcgtagtttgttagagcgaggcaaacatactgctatcctcaactatcgttacttccgagttagactacaacaaggacaagctgaactacaaagggaatttgaagagtcttggtgtaaagctttaacaaatgatggtaatttagcaccttggataagtgatagaagatgtatcatcagaaatttgatgttgttgctctttgtagaagccagtcctcaagcaggattttgcttacattatcaaactttacgccttttaaaaaaaccaaattatgaaactctttggcgtgacttggtagatttatatccatttctagtagaagatgagccaacaccagcgaaccaaggagaacaacaagaacaaggagtcaagcaatga

SEQ ID NO: 288 - protein, 788 aa, Nostoc sp
MNNSRTRTITALAWCLAWGERHNLNQDELSILHQIERAIKDEPDVPESIKSVVKQAKRLYDIPNDYEPETLEDLKKDYPDLWDEKRRIGLVYGGATKIKQYVFEAAKLNDIRGASALLDRINLDDIPGFFGEGGRSHRIGKWLDENGFSDLRQALIPELIIYSTGGSVLAFCPAALTDKLANAIEKRYTHETLTANSCAVGDTFRLLELRFGLLQDPIENTLWLEKYKQKQSNPNPNPIIQAYFNQSNESDLNKKFWLRKNFNELVGKLANQFTHRRNGNASATARPTRSFPPMFETHPYLERDETDNRAAVAKTNLPGTPSFSDALARKVIVGQRSKRDRQQRRRWYKNFRFRRQSGKEELWSPGYFPSWVTRFHKFLEQSESDRQYYQITQGEPVTEAFSLREIGNVSKLRGFVGYIYADGNNMGGYLRQHIRTPEKYREFSKQVLDATRNAVYIALEKHLKPRRLNNLIDPDNAHRNGDWIYPFEIITIGGDDVLLIVPADKALDVAKTIGEEFEREILKSPGFRLNKPYEPEKVHRYQGEKPSEYTSQCELSMSAGVLITAENTPIYYAQELTEQLLKSSKKLAKELKRYNYYGGTVDFLVLKAVTMIASDVKDFREQGLTKGNLKLYASPYTLHELGGLLQTVEALKKAKFPKSQLYQIRSLLERGKHTAILNYRYFRVRLQQGQAELQREFEESWCKALTNDGNLAPWISDRRCIIRNLMLLLFVEASPQAGFCLHYQTLRLLKKPNYETLWRDLVDLYPFLVEDEPTPANQGEQQEQGVKQ

SEQ ID NO: 289 - DNA, 354 bp, Nostoc sp
gtgaatttaataatgcaggagaaatttatgaaattcagtggaaacaccatatctatagaagtaaaatcttctaatcatcatccaaatttcctgagttacaataagcggttggaaccagaaagtgagcaacataggtattcgacgataccaccgatagaattacaatcacaaccccatatatctttacaactaaatatctctgatgcgccacatcagaatcagataataccagtagagaaagctagcactattggtaagatttttggcaagacaaaatcagcaatctcactaatttcatttctcagatgcttagaaattttaaaagattggattagtgaagttttgaaacattaa

SEQ ID NO: 290 - protein, 117 aa, Nostoc sp
MNLIMQEKFMKFSGNTISIEVKSSNHHPNFLSYNKRLEPESEQHRYSTIPPIELQSQPHISLQLNISDAPHQNQIIPVEKASTIGKIFGKTKSAISLISFLRCLEILKDWISEVLKH

SEQ ID NO: 291 - DNA, 156 bp, Nostoc sp
ttgactcaatatgtgttgaatattttaggcgatttcgtccccctatggggaaaattttttggtgcaggcgatcgcttgtttctgttattgagtagagtcaaatatctgaaattaatactaatgctgataaatttggcgaaatgtgatttcacataa

SEQ ID NO: 292 - protein, 51 aa, Nostoc sp
MTQYVLNILGDFVPLWGKFFGAGDRLFLLLSRVKYLKLILMLINLAKCDFT

SEQ ID NO: 293 - DNA, 1134 bp, Nostoc sp
atgccacgagcagccacaacacccaaacgcaagcctagagctaaatcagcaccaacatctctagttccaacatgggcagatgagacagaattggtaggcttggtgtttgacttagaggcaactgactcaggttctctctactcacagtacacaatcggacttcatgcttggtttctgcatcaagtgcagcaagttgacccagacctttcagcctatcttcatgatggagaatcggaaaaacccttcaatatatcggcattagaaggacaactgctacctagtggcaagcaattaaggttagaagccaagcaaacataccactggcatatcaatgcactgtctcaaaaagtggcattgttcctcaaagaatggttgacgaacttaccgaaaactattgagttaagtggcacacctctacaaatcaaacaagtgagtattgctcatgcaccaacaacttatgcacagttattgcaaccatcaacgcaaccatcattagtcaatctgagctttgtctcacctaccagttttcggcgcaaaggtcatcatttccctctaccagtaccagaaaatctgtttcatagttacttgcggcgatggaatgacttttccaatatgctagtaaatcaagagagttttctggaatggatagacgaaaacgtgatcattcatcaacaccgtttgcagtcagagaaagtagcagcagggaagcgggggtcagtcacaggttttacaggtgcaatatctttaggtttgagccgggcagggttagctaatgcagactttactaaattattttatgctttggtgcagttatctccctattgcggcacaggacataaaacgacatttggtttagggcaaacacgtttagactggttagaacagaagccaacgacatcggctcagttgttggagaatatattggcagaacggatcgaggaactgacagaaatattcacagcacaacgcaaacgcaagggtggcgatcgcactgataaaatagctgctacctgggcaactgttttggctcgtcgagacatgggagattcactccaggcgatcgctgatgatttagagatgccgctattgactgtaaaaacttatgtaaagttagcgcggaaagctttaaagtga

SEQ ID NO: 294 - protein, 377 aa, Nostoc sp
MPRAATTPKRKPRAKSAPTSLVPTWADETELVGLVFDLEATDSGSLYSQYTIGLHAWFLHQVQQVDPDLSAYLHDGESEKPFNISALEGQLLPSGKQLRLEAKQTYHWHINALSQKVALFLKEWLTNLPKTIELSGTPLQIKQVSIAHAPTTYAQLLQPSTQPSLVNLSFVSPTSFRRKGHHFPLPVPENLFHSYLRRWNDFSNMLVNQESFLEWIDENVIIHQHRLQSEKVAAGKRGSVTGFTGAISLGLSRAGLANADFTKLFYALVQLSPYCGTGHKTTFGLGQTRLDWLEQKPTTSAQLLENILAERIEELTEIFTAQRKRKGGDRTDKIAATWATVLARRDMGDSLQAIADDLEMPLLTVKTYVKLARKALK

SEQ ID NO: 295 - DNA, 37 bp, Porphyromonas gingivalis
gtcttaatagccttacggactgtgtatgtatagtgag

SEQ ID NO: 296 - DNA, 291 bp, Porphyromonas gingivalis
atgaatgacaaaaaactgctggttgcgtacgacatatcctccaacaggcgaagacgtaaggttgcacggatattggagcagtgcggtatacgcatcaataagtcggtattcatctgcagcctgcgagagctgacaatggacaagttggtagaggctgttacctcagagacagccaagagagacaaggtgttttttcttcctctctgtcagcattgttacaccgctgcttggatgagcggacatccgaccctccctaagagccggagaaaaaggaaaagtattgtggtttag

SEQ ID NO: 297 - protein, 96 aa, Porphyromonas gingivalis
MNDKKLLVAYDISSNRRRRKVARILEQCGIRINKSVFICSLRELTMDKLVEAVTSETAKRDKVFFLPLCQHCYTAAWMSGHPTLPKSRRKRKSIVV

SEQ ID NO: 298 - DNA, 759 bp, Porphyromonas gingivalis
ttgccttccgtgatggaggcccagatgcgcctgagcgaagagaaaaagcgagagttcatccttactcttatcaagaacaaggttcgcaatcagggcaaactcctgcgctactaccataagtattatcgccatgacaaagagctgaaagagcctctctccaacgctatcgccgagctaaagcagctggaaggtatacccatagcggagggcaactcccttgcggacttccgacagcatgccatgcttcatgaagcccgctgcgcacaagtctattggagggcatttgccctgctggtgcatcgctccgggcatgaatttgaagggagagagcataagggagccgagggattggtcaatcagatgctaaactatggctacgctatcctccggagctatgtgatgaagacaatagacctttggcagctcaacccgaatatcggtatcctgcacagcacgcaagacaataaaccggccctgtgtttcgatctcatggagcaataccgggcctttgtcgtcgataggagcatcctggccctactggccaagggggaagatgtggggcagaataacaaagggctgttggatatgcctacacgcagtcgcattatatcgaagataaacgaacgctggtttgctaccgaatactatcgatccggggaaaagcttttctccgatattatgaagttgcaaaccaaagatgtgagagctttttgctgtggcaaggtgaagcgcatcaaattctatacccctaaatggtag

SEQ ID NO: 299 - protein, 252 aa, Porphyromonas gingivalis
MPSVMEAQMRLSEEKKREFILTLIKNKVRNQGKLLRYYHKYYRHDKELKEPLSNAIAELKQLEGIPIAEGNSLADFRQHAMLHEARCAQVYWRAFALLVHRSGHEFEGREHKGAEGLVNQMLNYGYAILRSYVMKTIDLWQLNPNIGILHSTQDNKPALCFDLMEQYRAFVVDRSILALLAKGEDVGQNNKGLLDMPTRSRIISKINERWFATEYYRSGEKLFSDIMKLQTKDVRAFCCGKVKRIKFYTPKW

SEQ ID NO: 300 - DNA, 1086 bp, Porphyromonas gingivalis
atggcataccaatccaagaataccgatgagcatgtaacatttgcagacgcactcctttcaaagcgttatcgcaaagcacaaaacgacttcctcaatcaggttgacacgcttatcgattggcgtccgatcaggacgctgatcaacaagaaatacacgaagcgacaaaatgccatcggcgccccggcttatgacgtgattctcttattcaagatgttgcttttggagacatggtacaacctcagtgattgtgctttggaggagcgcatcaatgattcaatcaccttttcccgattcttggggctgaagatggaagaggtatctcccgaccacagcaccatcagtcgatttcgttcggcactgacagagttgggtctcatggacaaactattggcgcagtttaacaaacaactttcccgccatcacatttcggtcagggaaggggtgcttgtggatgcaagccttgtggagacgccgcataaacccaacggaagcattacgattgaagtcgcagacgacagagaagacaatcggagcgaggcggaaaaagaggcagaggaggattatcaaaaacaggttgtccgtcaacgtaaagggacggatgaagaagcccgttgggtgtacaaacaaaagcgttatcactacggatacaaaaagcattgtctgaccaatgttcaaggcattgttcaaaaggtgataacgacagcagcgaaccgcagtgacacaaaggagtttattccgctattggagggtgcaaacatacctcaaggcacagccgtcttggcggacaaaggatatgcttgcggggaaaatcgttcctacctgcaaacccatcaccttcaagacggcatcatgcacaaggcacaatgcaacagggcattgaccgaggaagagaagcaacgaaacaaagcaatcggtccgatacggagcaccatcgaacgcacctttggcagtattcgccggtggtttcatggcggacgatgtcgataccggggacttgccaagacccatactcaaaacattcttgaaagcatcgcctttaatttatacagaaccccggggataattatgtcctcatccgtaggataa

SEQ ID NO: 301 - protein, 361 aa, Porphyromonas gingivalis
MAYQSKNTDEHVTFADALLSKRYRKAQNDFLNQVDTLIDWRPIRTLINKKYTKRQNAIGAPAYDVILLFKMLLLETWYNLSDCALEERINDSITFSRFLGLKMEEVSPDHSTISRFRSALTELGLMDKLLAQFNKQLSRHHISVREGVLVDASLVETPHKPNGSITIEVADDREDNRSEAEKEAEEDYQKQVVRQRKGTDEEARWVYKQKRYHYGYKKHCLTNVQGIVQKVITTAANRSDTKEFIPLLEGANIPQGTAVLADKGYACGENRSYLQTHHLQDGIMHKAQCNRALTEEEKQRNKAIGPIRSTIERTFGSIRRWFHGGRCRYRGLAKTHTQNILESIAFNLYRTPGIIMSSSVG

SEQ ID NO: 302 - DNA, 2289 bp, Porphyromonas gingivalis
atgccactctccacagattcgttgccgatctttttatcggacttcaccgcctaccattttagcgttcgtttcagagccgaacgtgctatcgctttcgaacgcaaatggtatttcatgcctcggtttgcattgggcaatgccctcaaaaatagtgagcaatacgcctacctctatgggcagatattcaagccacaagaggaagacacggacgaaagcaagggaccgggcaacacctcgcgtctgatcattcgagccgacaaaccctctcggaagtctctggaggcaggcgaagccttggatctgtatattaccgtcgtaacgagagatcctctactggtcggagacttcctctctttccttccggaatggcaggcgtacaacttctttcgagaaaatgatctcacatacgactcctaccgcttgtacaatcccacgacagagaaatacgagtccgggctaagggtagaggatgcagcacttacggtagacttcttctctcggcaagcaatccgttggggtgaaatcctctctgtacgctttctgtctccggccagtatcaaggtagatcaaatactgtccgctgaaataccctactcgcgtctgatgaatagactctcacggcgtctgtatgagctatatacgcaatacctgagcaggggagagacgtctgtggagcgatatattttccccgaccatgatgggctgatttactcccagataagtatgccacgcaaggcgactatcaaggaaaacagacagtacgacatgtccggcatattgggtcagctcttctatcgtgttccctacgatcccgtagcagcccttatgctctcgatggcgcattgggtgcatataggcaatcatacaatcgtggggaatggtcagatagagagcactccgggcaacgataccttgtatcgtaagtggctctcttcgctggctgcggatcgtgaccttcccatggcagaagcggagcgacaagatttgttggaagccctacgtatttgcagctatataccgcagccctatcactctgtgaacatacccaagggggatggctcttaccgacagctacatatcccttcggcagtggatctccacttgcagagaagccttgccggcatactctatccgatcaccgagtctttatccattgcacagagctatgcctatcgcaaggggaagggagctgtggctgccgttcgtagagtgcagcatctgctggattctttggatgagaactacacagtggtgcgttgcgatattgacaacttcttcgattctatccctgtcccctctctattgcagaaagtccaaagaacaaccgaagatcccctccttacccgtatgttgagcctctggatgaagtccggagtcgtggaccggaagcagcagtatgctccggcatcctccggcatcccacagggaagccctctggcccctctgctttccaacctctacttggaagacacggatcgctacattgccgggcatataacaaccgaatttatccgctatgccgacgacctgctactcttcttgccggagaaagtagatccgctaaatgctctccaagacctgagcgaacatttgaaataccgcaaagggctgaagctgaatagggactttgtggtatcgagcataaaaagctctttcagtttcctcggtattacgttctgtgcagatggctcaaggagtatgagccaagataagaaggagggactcaaacgcaagatcacactcgcgctccatcgcgacaccgaaaacttctcagctctctcggagacaatccatggcatggagcagtactaccgcaaactgctcgaaaaggtggacatagaggctattgacgaagttgccgccactgtctatgccacttacatcgcatcattaccgacctccgaggctcggaaaagtgccaaggacaatcttctacggctgggctttctctcttcggaaacggccaaacagactcttcgagaggctatgcggcagacagaggtctcaagtgcagacaatttcccgataaagaaagagagcgaaatcctgcgtgagcagcaaaaaagacaattgcaagagaggggagagatattcgatttggtagttaccgagcccggagctttcatcggtatcagtcgcaaccatgtgctcgtaaggaagtacgggaagacaatctgcaaacaacctgctgcacagatagagcagatcagcatcatcagtgacggtgtctctctcagcagtaatgtcaccaaatattgcagaaagaagaatatcagagtcatattctga

SEQ ID NO: 303 - protein, 762 aa, Porphyromonas gingivalis
MPLSTDSLPIFLSDFTAYHFSVRFRAERAIAFERKWYFMPRFALGNALKNSEQYAYLYGQIFKPQEEDTDESKGPGNTSRLIIRADKPSRKSLEAGEALDLYITVVTRDPLLVGDFLSFLPEWQAYNFFRENDLTYDSYRLYNPTTEKYESGLRVEDAALTVDFFSRQAIRWGEILSVRFLSPASIKVDQILSAEIPYSRLMNRLSRRLYELYTQYLSRGETSVERYIFPDHDGLIYSQISMPRKATIKENRQYDMSGILGQLFYRVPYDPVAALMLSMAHWVHIGNHTIVGNGQIESTPGNDTLYRKWLSSLAADRDLPMAEAERQDLLEALRICSYIPQPYHSVNIPKGDGSYRQLHIPSAVDLHLQRSLAGILYPITESLSIAQSYAYRKGKGAVAAVRRVQHLLDSLDENYTVVRCDIDNFFDSIPVPSLLQKVQRTTEDPLLTRMLSLWMKSGVVDRKQQYAPASSGIPQGSPLAPLLSNLYLEDTDRYIAGHITTEFIRYADDLLLFLPEKVDPLNALQDLSEHLKYRKGLKLNRDFVVSSIKSSFSFLGITFCADGSRSMSQDKKEGLKRKITLALHRDTENFSALSETIHGMEQYYRKLLEKVDIEAIDEVAATVYATYIASLPTSEARKSAKDNLLRLGFLSSETAKQTLREAMRQTEVSSADNFPIKKESEILREQQKRQLQERGEIFDLVVTEPGAFIGISRNHVLVRKYGKTICKQPAAQIEQISIISDGVSLSSNVTKYCRKKNIRVIF

SEQ ID NO: 304 - DNA, 747 bp, Porphyromonas gingivalis
atgaatttcggacactggtattatcgagagtatttcgatacgataaatctcgacagcaagggcattgtaaccaacttctccacgttcaataaagggaagaacgataaactaataaagggagctactctccctccctacgacaaggaaaatgatattgaggatgtaacgagcttcgagctgaagacctgctatccggggttgctctgtggtgtgggctatcaccacgagataaacaaccctaagaacgagccgaaggaagatgacgcaccggaggtttataaccttgggatgtactttgattatacatcgggtttgcccgttatccccggttcttctatcaaagggatgctacgctctgccatcgaagagtgggactttcttgcagattatgagctcaacaatggagttacacgtgaagaaattattgagaaagtatttgtaggaaaagaatattccatttatgacagagacatattcctcgatgctatcccgataaaagcagataacaaactctttggagaggactatatcacgcaccatcctacacctctgcaaaaccctaatcctgtacgtttcttgagagtcaatccgggtgtaacctatcagtttcgctttatccttagaaataatgataacggattaaaagcagattttaaggaagacctcttcaaagctattatctgcacttttggtctcggggccaagaccaatgtcggctatgggcaatttgtagaaccagagaagtag

SEQ ID NO: 305 - protein, 248 aa, Porphyromonas gingivalis
MNFGHWYYREYFDTINLDSKGIVTNFSTFNKGKNDKLIKGATLPPYDKENDIEDVTSFELKTCYPGLLCGVGYHHEINNPKNEPKEDDAPEVYNLGMYFDYTSGLPVIPGSSIKGMLRSAIEEWDFLADYELNNGVTREEIIEKVFVGKEYSIYDRDIFLDAIPIKADNKLFGEDYITHHPTPLQNPNPVRFLRVNPGVTYQFRFILRNNDNGLKADFKEDLFKAIICTFGLGAKTNVGYGQFVEPEK

SEQ ID NO: 306 - DNA, 438 bp, Porphyromonas gingivalis
atgaataagaagaccatacaagatttgatccccaaggctatgcaagccattgaaggagtaggtattgtgggcaaggataagaagttcgagaaagtccacgagggatatatcaatgctcttggtcctaatatcattcagtcgggacttctccctacgctcatattctataacaaggacgagcgagccctatggctcagagctttatactatatggcagtggacggagaggaaaagatgactgatgaatcttccacagccattatccgacttataataggcaaagaagggggaaggatagaaaacttaaagcccaaagcaaaggagtgggagcgcaaaatacttgagtatgcggtggctctcaagctggcgcttaggacttttgttgccaaagagtctgaaacaggcaatacagaacaacaaaaaggaggtgcgcaatga

SEQ ID NO: 307 - protein, 145 aa, Porphyromonas gingivalis
MNKKTIQDLIPKAMQAIEGVGIVGKDKKFEKVHEGYINALGPNIIQSGLLPTLIFYNKDERALWLRALYYMAVDGEEKMTDESSTAIIRLIIGKEGGRIENLKPKAKEWERKILEYAVALKLALRTFVAKESETGNTEQQKGGAQ

SEQ ID NO: 308 - DNA, 702 bp, Porphyromonas gingivalis
atgaaaacagcagcttatatgatccattgccttaccaatatgcatgtgggtaagggagatgccacctacgaagtggtggacaaatgtgtacagcgagatgtaaccacagggatgccctgcatctactcctccagcctcaaaggagctttgagacagttcttttcgaaacaaggctttgccgagcttaactatgtttttggaaaagatcagagcagggataagaaaaataatggcaatgagaagaatgaagaagagcatagcgttggcaacttcactttcttccaagccaacctattagcctatcctgttcagacaactcaagagggtgccacttacatcctcaaaacaaataaagccctgcaagagtctataaaggagttagcaaaacttctttctgctccatcgaatattgaagatctgttacctgaagggattgaaaaggatttatccaatgaggccctcgagcaactcccggtcatagcccgcaatcaattggacaatgggaagagtgagaacctgtggtacgaagaggtcgtacctgccgagagccgttttgtcttcttcgtatcctacgatgatgaagagatctttgcgaagttcgacaagataatccaagagggagtcatccaaataggtgccaatggctctatcggttacggtttttgcaagattgctaatgttacaaatcccttcaaaaaatga

SEQ ID NO: 309 - protein, 233 aa, Porphyromonas gingivalis
MKTAAYMIHCLTNMHVGKGDATYEVVDKCVQRDVTTGMPCIYSSSLKGALRQFFSKQGFAELNYVFGKDQSRDKKNNGNEKNEEEHSVGNFTFFQANLLAYPVQTTQEGATYILKTNKALQESIKELAKLLSAPSNIEDLLPEGIEKDLSNEALEQLPVIARNQLDNGKSENLWYEEVVPAESRFVFFVSYDDEEIFAKFDKIIQEGVIQIGANGSIGYGFCKIANVTNPFKK

SEQ ID NO: 310 - DNA, 1182 bp, Porphyromonas gingivalis
atgtctacctatcttattaaacttacgcctttggataagtttttctttgggcagaagaaaacctttggcgatgacaatgccaactacttcgtgtactcctcccactttccacagcaaaccaccttgttggggcttttgcgctatcaactgttgcaaatagcaggagaggaaatcttcaaggataataaaatacaagatgaacataaagctggtgaattgattggcaaacagagtttctctccatttgtcaaggataagttgcagtttggtattatccaatcgctctctcctgtctttatcatagacaagaagaaagatgagggtaaggaagagtacttcctacctgtgggtaaacggtttcaaaagaagaaagaaaaagccccatacagtctcttacacctctcctgtgaagatgaatgccctcctatcttcggcgaatacaaacccaagaaagggctggcgtcttgctggctatcttccaaaagccatacgctccttaacgaagaggacttcttcacaaaagatgagcgcatcgggatacgcaaagattatgaaggagcaacgaacgatgatgctttcttctgtcagagatactatcgcttcaaaaacttcaaaaaggtagtagaggacgaagaggccaaggtgtgcaagcaaccacccgtacgagtgcacgacttctgctttgccactgttttagagacagagaaagcaatcgaacacgaaaagttggatgggagaatcgtctacctcggtggagagcggcaacctttcctcatggaggtaagtgaagagaccttcaaactcaccattgagagttctactcttacgagcgatgagaagcactatactgtagtactcctgtccgatgctatgattgagcctgagcacctcgagggggtaaaatttgcaagcacggaggtgaaagactttgcctgtttgctcactcacgtagggacacgaaagttctacaacaaggagaacaagaggcagacacagtaccttacggagtcggcaactgccctaagtgtgcaaaaggaactatacgccagaggttccgtgttttacttcgatactaaagagcaagcaaatcaattctgtgaggacctcgagaaagtccccaacttccataccatcggctacaatcatgctatcatcatcgaaccaacaaaaacaaaaaaataa

SEQ ID NO: 311 - protein, 393 aa, Porphyromonas gingivalis
MSTYLIKLTPLDKFFFGQKKTFGDDNANYFVYSSHFPQQTTLLGLLRYQLLQIAGEEIFKDNKIQDEHKAGELIGKQSFSPFVKDKLQFGIIQSLSPVFIIDKKKDEGKEEYFLPVGKRFQKKKEKAPYSLLHLSCEDECPPIFGEYKPKKGLASCWLSSKSHTLLNEEDFFTKDERIGIRKDYEGATNDDAFFCQRYYRFKNFKKVVEDEEAKVCKQPPVRVHDFCFATVLETEKAIEHEKLDGRIVYLGGERQPFLMEVSEETFKLTIESSTLTSDEKHYTVVLLSDAMIEPEHLEGVKFASTEVKDFACLLTHVGTRKFYNKENKRQTQYLTESATALSVQKELYARGSVFYFDTKEQANQFCEDLEKVPNFHTIGYNHAIIIEPTKTKK

SEQ ID NO: 312 - DNA, 1581 bp, Porphyromonas gingivalis
ttggctaaggctcgaagcgtgaagtccttttggacggcgagctacctcttctcttggataatgcgagaattgctcgaaaaactacctaaagaaaactttgagattctctctccatatcgagctggcaaagatgttttgggtgagatttctaaaaaggtaggcttattccccgataggctttttgccaaaggagagcttgaagagaaggaattcaaaagaataaaaagggaaatcttcggagaacttgctgaaaaattcaagaatgcttttcaggatgaaaaagatgatattgcccgaaagatagatacggaaagtgaccaaaagcggaagagagagcttgaagaaataaaaagtcggtatagcaatgctgcttcgaagggcgaggatattcgcaagtacttagagaattatctctctatctccagcataacggtggagcttagctccgattgtagcattttggagcaactcaataaatacttagacacacaggagttgttcaataaggcctccacccaaaccgaagaagattatatggaaatgttcatcgaggctcccaatattcctttcttaaaggcctattcccaagatagagctttccccagcacttcagagatagctgtatcgggatgggaacaaaatcctcccaaagatgcaaacggagaggtagactatagcaaattgacctcaaagacagggtttcgcaactgctacaagtatttggcagtcataaaggcggacggggatggctttgggacatacatcaaagaactcaaagtagacgaggaaaaggaaataaaagaaaacggagaaaaggaaaacgagttaacgagatttacaaaatcgttcttcgagttctctgttgaggtggccaatgagttaatacagaaaacaaaggctatacctgtctatatcggaggagatgatctctttctctttgctcctgtattggagggcaatgtcgaaaaggatgtattcaaccttattaaggagatagatgacctatttatccaaaaggaaataggcgaaggtctttcgatgtcttacggcgtaagtatcttttactacaagagtcccatgtctgaggcaatagacatagccgatagtatgttgaggaaagcaaaggaagagaaagaggaaaaggaaaagaagaaagataccgtagctatatccatacagaaacacagtgggcagaagatagagttcttgctcccctgcaagcatagtaccgataagtgtaaacaagaaacaggcctatacaaaaaggcaaccgagcttatacgagcttttaaggaagatgacagtatgctcaacagtcttatctattggatagaagatatgtatgagacaattttcaccgacgaggttaccctataccaagagcgtatcaatgcggtctttgacaactttttcgacgaagagattcacaaggagaacgaagtgtttttcgacctcctgaagaagtttatccactccatgcatcactccgaagatcccccccgcaagttgaaagacaaaaagaaactactgcacggcatcttgcgctactgtcaatttgtaacggctaaaaaagagaaataa

SEQ ID NO: 313 - protein, 526 aa, Porphyromonas gingivalis
MAKARSVKSFWTASYLFSWIMRELLEKLPKENFEILSPYRAGKDVLGEISKKVGLFPDRLFAKGELEEKEFKRIKREIFGELAEKFKNAFQDEKDDIARKIDTESDQKRKRELEEIKSRYSNAASKGEDIRKYLENYLSISSITVELSSDCSILEQLNKYLDTQELFNKASTQTEEDYMEMFIEAPNIPFLKAYSQDRAFPSTSEIAVSGWEQNPPKDANGEVDYSKLTSKTGFRNCYKYLAVIKADGDGFGTYIKELKVDEEKEIKENGEKENELTRFTKSFFEFSVEVANELIQKTKAIPVYIGGDDLFLFAPVLEGNVEKDVFNLIKEIDDLFIQKEIGEGLSMSYGVSIFYYKSPMSEAIDIADSMLRKAKEEKEEKEKKKDTVAISIQKHSGQKIEFLLPCKHSTDKCKQETGLYKKATELIRAFKEDDSMLNSLIYWIEDMYETIFTDEVTLYQERINAVFDNFFDEEIHKENEVFFDLLKKFIHSMHHSEDPPRKLKDKKKLLHGILRYCQFVTAKKEK

SEQ ID NO: 314 - DNA, 37 bp, Porphyromonas gingivalis
ctcactatacatacacagtccgtaaggctattaagac

SEQ ID NO: 315 - DNA, 291 bp, Porphyromonas gingivalis
atgaatgacaaaaaactgctggttgcgtacgacatatcctccaacaggcgaagacgtaaggttgcacggatattggagcagtgtggtatacgcatcaataagtcggtattcatctgcagcctgcgagagctgacaatggacaagttggtagaggctgttacctcacagacagctaagagagacaaggtgttttttcttcctctctgtcagcattgttacaccgctgcttggatgagcggacatccgaccctccctaagagccggagaaaaaggaaaagtattgtggtttag

SEQ ID NO: 316 - protein, 96 aa, Porphyromonas gingivalis
MNDKKLLVAYDISSNRRRRKVARILEQCGIRINKSVFICSLRELTMDKLVEAVTSQTAKRDKVFFLPLCQHCYTAAWMSGHPTLPKSRRKRKSIVV

SEQ ID NO: 317 - DNA, 3096 bp, Porphyromonas gingivalis
atgccactctccacagattcgttgccgatctttttatcggacttcaccgcctaccattttagcgttcgtttcagagccgaacgtgctatcgctttcgaacgcaaatggtatttcatgcctcggtttgcattgggcaatgccctcaaaaatagtgagcaatacgcctacctctatgggcagatattcaagccacaagaggaagacacggacgaaagcaagggaccgggcaacacctcgcgcctgatcattcgagccgacaaaccctctcggaagtctctggaggcaggcgaagccatggatctgtatattaccgtcgtaacgagagatcctctgctggtcggagacttcctctctttccttccggaatggcaagcgtacaacttctttcgggaaaatgatctcacatacgactcctaccgcttgtacaatcccacgacacagaaatacgagtccgggctaagggtagaggatgcggcacttacggtagacttcttttctcggcaagcaatccgttggggtgaaatcctctctgtacgctttctgtctccggccagtatcaaggtagatcaaatactgtccgccgaaataccctactcgcgtctcatgaatagactctcacggcgtctgtatgagctatatacgcaatacctgagcaggggagagacatctgtggagcgatatattttccccgaccatgatgggctgatttactcccagataagtatgccacgcaaggcgactatcaaggaaaacagacagtacgacatgtccggcatattgggtcagctcttctatcgtgttccctacgatcccgtagcagcccttatgctctcaatggcgcattgggtgcatataggcaatcatacaatcgtggggaatggtcagatagagagcactccgggcaacgataccttgtatcgcaagtggctctcttcgctggctgcggatcgtgaccttcccatggcagaagcggagcgacaagatttgttggaagccctacgtatttgcagctatataccgcagccctatcactctgtgaacatacccaagggggatggctcttaccgacagctacatatcccttcggcagtggatctccacttgcagagaagccttgccggcatactctatccgatcaccgagtctttatccattgcacagagctatgcctatcgcaaggggaagggagctgtggctgccgttcgtagagtgcagcatctgctggattctctggatgagaaccatacagtggtgcgctgcgatattgacaacttcttcgattctatccctgtcccctctctattgcagaaagtccaaagaacaaccgaagatcccttccttacccgtatgttgagcctctggatgaagtccggagtcgtggaccggaagcagcaatatgctcgtgcatcctccggcatcccacagggaagccctctggcccctctgctttccaacctctacttggaagacacggatcgctacatcgccgggcatataacaaccgaatttatccgctatgccgacgacctgctactcttcttgccggagaaagtagatccgctaaatgctctccaagacctgagcgaacatttgaaataccgcaaagggctgaagctgaatagggactttgtggtatcgagcataaaaagctctttcagtttcctcggtattacgttctgtgcagatggttcaaggagcatgagccgggacaagaaagagggactcaaacgcaagatcacactcgcgctccatcgcgacaccgaaaacttctcagctctctcggagacaatccatggcatggagcagtactaccgcaaactgctcgaaaaggtggacatagaggctattgacgaagttgccgccactgtctatgccactcacatcgcatcattaccgacctccgaggctcggaaaagcgccaaggacaatcttctacggctgggctttctctcttcggaaacggccaaacagactcttcgagaggctatgcggcagacagtggtctcaagtgcagacaatttcccgataaagaaagagagcgaaatcctgcgtgagcagcaaaaaagacaattgcaagagaggggagagatattcgatttggtagttaccgagccaggagctttcatcggtatcagtcgcaaccatgtgctcgtaaggaagtacgggaagacaatctgcaaacaacctgctgcacagatagagcagatcagcatcatcagtgacggtgtctctctcagcagtaatgtcaccaaatactgtaggaagaagaatatcagagtcatattctacaatgcaacgggccaggcctatgcctctctcaacggcatgaataccatcttgccttccgtgatggaggcccagatgcgcctgagcgaagaaaaaaagcgagagttcatccttactcttatcaagaacaaggttcgcaatcagggcaaactcctgcgctactaccataagtattatcgccatgacaaagagctgaaagagcctctctccaacgctatcgccgagctaaagcagctggaaggtatacccatagcggagggcagctcccttgcggacttccgacagcatgccatgcttcatgaagcccgctgcgcacaagtctattggagggcatttgccctgctggtgcatcgctccgggcatgaatttgaagggagagagcataagggagccgagggattggtcaatcagatgctaaactatggctacgctatcctccggagctatgtgatgaagacaatagtcctttggcagctcaacccgaatatcggtatcctgcacagcacgcaagacaataaaccggccctgtgtttcgatctcatggagcaataccgggcctttgtcgtcgataggagcatcctggccctactggccaagggggaagatgtggggcagaatagcaaagggctgttggatatgcctacacgcagtcgcattatatcgaagataaacgaacgctggtttgctaccgaatactatcgatccggggaaaagcttttctccgatattatgaagttgcaaaccaaagatgtgagtgctttttgctgtggcaaggtgaagcgcatcaaattctatacccctaaatggtag

SEQ ID NO: 318 - protein, 1031 aa, Porphyromonas gingivalis
MPLSTDSLPIFLSDFTAYHFSVRFRAERAIAFERKWYFMPRFALGNALKNSEQYAYLYGQIFKPQEEDTDESKGPGNTSRLIIRADKPSRKSLEAGEAMDLYITVVTRDPLLVGDFLSFLPEWQAYNFFRENDLTYDSYRLYNPTTQKYESGLRVEDAALTVDFFSRQAIRWGEILSVRFLSPASIKVDQILSAEIPYSRLMNRLSRRLYELYTQYLSRGETSVERYIFPDHDGLIYSQISMPRKATIKENRQYDMSGILGQLFYRVPYDPVAALMLSMAHWVHIGNHTIVGNGQIESTPGNDTLYRKWLSSLAADRDLPMAEAERQDLLEALRICSYIPQPYHSVNIPKGDGSYRQLHIPSAVDLHLQRSLAGILYPITESLSIAQSYAYRKGKGAVAAVRRVQHLLDSLDENHTVVRCDIDNFFDSIPVPSLLQKVQRTTEDPFLTRMLSLWMKSGVVDRKQQYARASSGIPQGSPLAPLLSNLYLEDTDRYIAGHITTEFIRYADDLLLFLPEKVDPLNALQDLSEHLKYRKGLKLNRDFVVSSIKSSFSFLGITFCADGSRSMSRDKKEGLKRKITLALHRDTENFSALSETIHGMEQYYRKLLEKVDIEAIDEVAATVYATHIASLPTSEARKSAKDNLLRLGFLSSETAKQTLREAMRQTVVSSADNFPIKKESEILREQQKRQLQERGEIFDLVVTEPGAFIGISRNHVLVRKYGKTICKQPAAQIEQISIISDGVSLSSNVTKYCRKKNIRVIFYNATGQAYASLNGMNTILPSVMEAQMRLSEEKKREFILTLIKNKVRNQGKLLRYYHKYYRHDKELKEPLSNAIAELKQLEGIPIAEGSSLADFRQHAMLHEARCAQVYWRAFALLVHRSGHEFEGREHKGAEGLVNQMLNYGYAILRSYVMKTIVLWQLNPNIGILHSTQDNKPALCFDLMEQYRAFVVDRSILALLAKGEDVGQNSKGLLDMPTRSRIISKINERWFATEYYRSGEKLFSDIMKLQTKDVSAFCCGKVKRIKFYTPKW

SEQ ID NO: 319 - DNA, 762 bp, Porphyromonas gingivalis
atgaatttcggatactggtactatcgagagtatttcaatacgataaaactcaatagtgagggcattgtaaccaacttctccacgttcaataaagggaagaacgataaactaataaagggagctactctccctccctgcgacaaggaaaatgatattaaggatgtaactggcttcgagctaaagacctgctatccggggttgctctgtggtgtgggctatcaccacgagataaacaaacctgcggatgaaaagggtaagaaggttgagggggataaggaagatgatgcaccagaggtttacaaccttgggatgtacttcgactatacatcgggtttgcctgttatccccggctcttctatcaaagggatgctacgctctgccatcgaagagtgggacttccttgcagattatgagctcaacaatggagttacacgtgaagaaattattgagaaagtatttgtaggaaaagaatattccatttatgacagagacattttcctcgatgccattcctataagagtagataacactctctttggagaggactatatcacgcaccatcctaatcctctgcaaaaccctaatcctgtacgttttttgagggttgaaccaggtgtaacctatcagtttcgctttatcctgaaagatcatggagagaaactaacggtagactttaggacaaagctcttcaaagctattatctgcacttttggtctcggggccaagaccaatgtcggctacgggcaatttgtagaaccttag

SEQ ID NO: 320 - protein, 253 aa, Porphyromonas gingivalis
MNFGYWYYREYFNTIKLNSEGIVTNFSTFNKGKNDKLIKGATLPPCDKENDIKDVTGFELKTCYPGLLCGVGYHHEINKPADEKGKKVEGDKEDDAPEVYNLGMYFDYTSGLPVIPGSSIKGMLRSAIEEWDFLADYELNNGVTREEIIEKVFVGKEYSIYDRDIFLDAIPIRVDNTLFGEDYITHHPNPLQNPNPVRFLRVEPGVTYQFRFILKDHGEKLTVDFRTKLFKAIICTFGLGAKTNVGYGQFVEP

SEQ ID NO: 321 - DNA, 444 bp, Porphyromonas gingivalis
atgaataagaagaccatacaagatttgatccccaaggctatgcaagccatcgagggagtaggtattgtgggcaaggataagaagttcgagaaagtccacgagggatatatcaatgctcttggtcctactatcattcagtcgggacttctccctacgctcatattctacaacaaggataagcgagagctatggcttaaggcactatactatatggaaatcataagcaacgatatagaccccacggccattatccaacttatcataaaagagggggatagtgaaagtaggcaagagaaaactctaaaagagttagagcccaaagccaaggagtgggagcgcaaaatacttgagtatgcggtggctctcaagctggcgcttaggacttttgttgccaaagagtctgaaacaggcaatacagaacaacaaaaaggaggtgcacaatga

SEQ ID NO: 322 - protein, 147 aa, Porphyromonas gingivalis
MNKKTIQDLIPKAMQAIEGVGIVGKDKKFEKVHEGYINALGPTIIQSGLLPTLIFYNKDKRELWLKALYYMEIISNDIDPTAIIQLIIKEGDSESRQEKTLKELEPKAKEWERKILEYAVALKLALRTFVAKESETGNTEQQKGGAQ

SEQ ID NO: 323 - DNA, 702 bp, Porphyromonas gingivalis
atgaaaacagcagcttatatgatccattgccttaccaatatgcatgtgggtaagggagatgccacctacgaagtggtggacaaatgtgtacagcgagatgtaaccacagggatgccctgcatctactcctccagcctcaaaggagctttgagacagttcttttcgaaacaaggctttgccgagcttaactatgtttttgggaaagatcagagcagggataagaaaaataatggcaatgagaagaatgaagaagagcatagcgttggcaacttcaccttcttccaagccaacctattagcctatcctgttcagacaactcaagagggtgccacttacatcctcaaaacaaataaaaccctgcaagatcctataaaggagttagcaaaccttttttctgctccatcgaatattgaagagatgttacctaaggagactgaaaaggatttatccaatgagaccctcgagcaactcccggtcatagcccgcaatcaattggacaatgggaagagtgagaatctatggtacgaagaggtcgtacctgccgagagccgttttgtcttcttcgtatcctacgatgatgaagagatctttacgaagttcgacaaaataatccaagagaaagtcatccaaataggtgccaatggctctatcggttatggtttttgcaagattgctaatgttacaaatcccttcaaaaaatga

SEQ ID NO: 324 - protein, 233 aa, Porphyromonas gingivalis
MKTAAYMIHCLTNMHVGKGDATYEVVDKCVQRDVTTGMPCIYSSSLKGALRQFFSKQGFAELNYVFGKDQSRDKKNNGNEKNEEEHSVGNFTFFQANLLAYPVQTTQEGATYILKTNKTLQDPIKELANLFSAPSNIEEMLPKETEKDLSNETLEQLPVIARNQLDNGKSENLWYEEVVPAESRFVFFVSYDDEEIFTKFDKIIQEKVIQIGANGSIGYGFCKIANVTNPFKK

SEQ ID NO: 325 - DNA, 1191 bp, Porphyromonas gingivalis
atgtctacctatcttattaagcttacgcctttggataagtttttctttgggcagaagaaaacctttggcgatgacaatgccaactacttcgtgtactcctccctcttcccacagcaaactaccttgttggggcttttgcgctatcaactgttgcaaatagcaggagaggaaatcttcaaggataataaaatccaagatgaacataaagctggtgaattgattggcaaacagagtttctctccatttgtcaaggataagttgcagtttggtattatccaatcgctctctcctgtctttatcatagacaagaagaagaacgatgagggtaaggaagagtacttcctacctgtgggtagacggtttcaaaaggagaatgaaaaagctccgtacaatctcttacacctctcctgtcaagctggatgccctcctatcttcggcgaatacaaacccaagaaagggctggcgtcttgctggctatcttccaaaagccatacgctccttaacgaagaggacttcttcacaaaagatgagcgcatcgggatacgcaaagattatgaaggagcaacgaacgatgatgctttcttctgtcagagatactatcgcttcaaaaatttcaaagaggtagagggcgaaaagaccaaggtgtgcaagcaaccacccgtacgagagcacgacttctgctttgcggtgcttttggagacccacagggatataaaacacgaagagttgaataagagaatcgtctacctcggtggagaacgacaaccttttcttatggatcttatggaggtaagtgaagagaccttcaaactcaacattgagagttctactcttacgagcgatgagaagcactacaccgtggtacttctatccgatgctatgattgaacctaagctccttgagggggtaaaatttgcaagcacggaggtgaaagactttgcctgtttgctcactcatgtaggaacacgcaggttctacaacaagaagaagaaaagagaggaacagaacatcgaagaagttgaaacggctctaagtcaccaacatgaactatacgccagaggttccgtgttttacttcgatactaaagagcaagcaaatcaattctgtgaggacctcgagaaggtccccaacttccataccatcggctacaatcatgctatcatcatcgaaccaacaaaaacaaaaaaataa

SEQ ID NO: 326 - protein, 396 aa, Porphyromonas gingivalis
MSTYLIKLTPLDKFFFGQKKTFGDDNANYFVYSSLFPQQTTLLGLLRYQLLQIAGEEIFKDNKIQDEHKAGELIGKQSFSPFVKDKLQFGIIQSLSPVFIIDKKKNDEGKEEYFLPVGRRFQKENEKAPYNLLHLSCQAGCPPIFGEYKPKKGLASCWLSSKSHTLLNEEDFFTKDERIGIRKDYEGATNDDAFFCQRYYRFKNFKEVEGEKTKVCKQPPVREHDFCFAVLLETHRDIKHEELNKRIVYLGGERQPFLMDLMEVSEETFKLNIESSTLTSDEKHYTVVLLSDAMIEPKLLEGVKFASTEVKDFACLLTHVGTRRFYNKKKKREEQNIEEVETALSHQHELYARGSVFYFDTKEQANQFCEDLEKVPNFHTIGYNHAIIIEPTKTKK

SEQ ID NO: 327 - DNA, 1647 bp, Porphyromonas gingivalis
atgagtaatgagatatacacagcaataaccattgggccgatatgtaaaaccttagacaaggctcgaagcgtgaagtccttttggacggcgagctacctcttctcttggataatgcgggaattgctcgaaagactacccaaagaagagcgaccggaaggaagctttgaggttctctctccacatcgagatggcaaagatgttccagaagaaacttctaaaaaggtgggcttattccctgatagactttttgccaaaggagagcttgaagaggagaaactccaagagataaaagggaaaatcttcatcgaacttgctgagaaattcaaaaatgcttttcaggatgaaaaagatggtattacccgaaagatagatacggaaagtgacccaaagcggaagagagagcttgaagaaatacaaagtcggtatagcaatgctgctttgaagggtgaggatattcgcaagtacttagagaattacctctctatctcctgcataacggtagagcttagctccgattgtaacatcttggagcaactcaatagctacttagacacacaggagttgttcaacaaagcctccatacagaccgacgaggattatatggagctctttatcgaggctcccaataatcctttcttaaaggcctattcccaagatagagctttcccaagcacttcggagatagctgtatcgggatgggaacaagatcctcccaaagatgaaaacggagaggtagagtacacccaattgacctcaaagcctggttttcgtaattgttacaagtatttggcagtcataaaggcggacggagatggctttgggacatacatcaaagaactcaaagtagacgaggaaaaggaaataaaagaaaacggagaaaaggaaaacgagctaagcagatttacgaaatcattcttcgagttctctgttgaggtagccaatgagttaatacagaaaacaaaggctatacctgtctatatcggaggggatgatctctttctctttgctcctgtattggagggcaatgtcgaaaaggatgtattcaaccttattaaggagatagatgacctatttatccaaaaggaaataggcgaaggtctttcgatgtcttacggcgtaagtatcttttactacaagagtcccatgtctgaggcaatagacatagccgatagtatgttgaggaaagcaaaggaagagaaagaggaaaaggaaaagaagaaagataccgtagctatatccatacagaaacacagtgggcagaagatagagttcctactgccgtgtaagcatagtaccgataagtgtaaacaagaaacaggcctatacaaaaaggcaaccgagcttatacgagcttttaaggaagatgacagtatgctcaacagtcttatctattggatagaagatatgtatgagacaattttcaccgacgaggttaccctataccaagagcgtatcaatgcggtctttgacaactttttcgacgaagagattcacaaggagaacgaagtgtttttcgacctcctgaagaagtttatccactccatgcatcactccgaagataccccccgcaagttgaaagacaaaaagaaactactgcacggcatcttgcgctactgccaatttgtaacggctaaaaaagagaaataa

SEQ ID NO: 328 - protein, 548 aa, Porphyromonas gingivalis
MSNEIYTAITIGPICKTLDKARSVKSFWTASYLFSWIMRELLERLPKEERPEGSFEVLSPHRDGKDVPEETSKKVGLFPDRLFAKGELEEEKLQEIKGKIFIELAEKFKNAFQDEKDGITRKIDTESDPKRKRELEEIQSRYSNAALKGEDIRKYLENYLSISCITVELSSDCNILEQLNSYLDTQELFNKASIQTDEDYMELFIEAPNNPFLKAYSQDRAFPSTSEIAVSGWEQDPPKDENGEVEYTQLTSKPGFRNCYKYLAVIKADGDGFGTYIKELKVDEEKEIKENGEKENELSRFTKSFFEFSVEVANELIQKTKAIPVYIGGDDLFLFAPVLEGNVEKDVFNLIKEIDDLFIQKEIGEGLSMSYGVSIFYYKSPMSEAIDIADSMLRKAKEEKEEKEKKKDTVAISIQKHSGQKIEFLLPCKHSTDKCKQETGLYKKATELIRAFKEDDSMLNSLIYWIEDMYETIFTDEVTLYQERINAVFDNFFDEEIHKENEVFFDLLKKFIHSMHHSEDTPRKLKDKKKLLHGILRYCQFVTAKKEK

SEQ ID NO: 329 - DNA, 37 bp, Porphyromonas gingivalis
gtgtaggaagacccgattgagtaagggggattgagac

SEQ ID NO: 330 - DNA, 999 bp, Porphyromonas gingivalis
atgtattcatccttcacctccctctccatagccaggttccggttcactattgaaccgacggaagaaatcagtctccccgaatacaaaggttctgcatttcggggcgggttcgggcatgcgttcaagcgggcgacctgtatcacccgcgaccggtattgcgagccgtgtattctgaaattttcctgtacctatttcaaggtgtttgagtcgaaggtatcgcgcgagacggctgaacggttgcgccttggaggcgacgcgcctcatccgttcattattgagccgccgcttacccgtcagggatattttcagccgggtgacaggctttccttttctcttgtattgatcggtacagctatagggcagttgccgttttttgtctatgcgttcatgattcttggtgagagttttggtattggtaaagggcgagggcggtttcgtttggtgtcggttgaagacgagaacgggaaacagttatacgacaacggaaatcttgctggtggttttgttatccgttcggctgatgagattatgaaaacagatgtttcctccgatgatgaccgcatgaagctgcgcttcgagacgcccctgcggatgaagacggcgtttggccgggatcgcaaagcactggttaccggtatgcatgagcctgcggatttcagggtgctcttgaaatcgttgtaccatcgtgcgtttgtgttgggtcagttgtatggggagggtgtcgatgaagcggagtatgatagccgaaacctgccgttggttgatggcactgttgcggtggaaaatgccgatatcttctggtacgactgggagcggttttcccagcgccaggagcgcagaatgaagcttggcggggtgatgggtgaagtgacgttcagcggaaaggttgcagagtacctcccgctgtttcggctgggtgaatatttgcatatcggcaagggaacagggttcggtcttggaaagtaccggattgccaaggaaagcgggaagacgccatga

SEQ ID NO: 331 - protein, 332 aa, Porphyromonas gingivalis
MYSSFTSLSIARFRFTIEPTEEISLPEYKGSAFRGGFGHAFKRATCITRDRYCEPCILKFSCTYFKVFESKVSRETAERLRLGGDAPHPFIIEPPLTRQGYFQPGDRLSFSLVLIGTAIGQLPFFVYAFMILGESFGIGKGRGRFRLVSVEDENGKQLYDNGNLAGGFVIRSADEIMKTDVSSDDDRMKLRFETPLRMKTAFGRDRKALVTGMHEPADFRVLLKSLYHRAFVLGQLYGEGVDEAEYDSRNLPLVDGTVAVENADIFWYDWERFSQRQERRMKLGGVMGEVTFSGKVAEYLPLFRLGEYLHIGKGTGFGLGKYRIAKESGKTP

SEQ ID NO: 332 - DNA, 1080 bp, Porphyromonas gingivalis
atgactacaagcctgaaggtttcctttatatggacaagaacattttttcagctttttgataattcctgtattcaaaacagcccatatgatttttttgtcaagccttcagcttataaggacaaaatcaagtcactctataccgatgagtcttcattaactcttccctggaagctgactggcaaaaacaatctaactaactggttctggaagtattatcttaatgatatcgatccgctttccgctcctcatgagacaattgctaatcgttgttatccgctctatgtgccggttcgcaagtcactgaccaagcagataacagttaactggccctcatcaggtggttcgcaaaatcggggctcttttgaaggctttttttaccgtcatggggttgctgttgtttgcactttttctgttcatggctgcacttctctcaaggatgctgtagagcagggaatgagtctgcgtcatgaccccttgttttcaataccatcaacaacgagtaacgtggccttgacaactgtgggagatttttgtcgaaaccttctcagtgaggagataaaggtggtaaccgactggttcgacgaggaaccattttctctcgttactgttgtggagggggagcttaatcaggaggcacagcaaggggatagcattcaacgtgcacttgaagcgcttgcatgctgggacaagacatgggaaaaaagggagctacctgttctatcagatcatacgatatcgatgaagaacaatcatgctgctgatatcatgtatgggcatgcaaatagtcgtgtgttatggatcccaagactttttataccgggtaataattatgctctcttctggtattccagaaatctgttaatggcgactatgcaggtgaaaagtttcagggattttcttgtcagggctgcggatgcagatcgcatcaagccgggaaccagattggggggatatgccagacagataggggagattattcgaaatatggaaaagggtttgaagacttatcgaacattaagtgcttatagacagatacaagatgacaaaaagcttcaagcagttttaagcgctatttcatga

SEQ ID NO: 333 - protein, 359 aa, Porphyromonas gingivalis
MTTSLKVSFIWTRTFFQLFDNSCIQNSPYDFFVKPSAYKDKIKSLYTDESSLTLPWKLTGKNNLTNWFWKYYLNDIDPLSAPHETIANRCYPLYVPVRKSLTKQITVNWPSSGGSQNRGSFEGFFYRHGVAVVCTFSVHGCTSLKDAVEQGMSLRHDPLFSIPSTTSNVALTTVGDFCRNLLSEEIKVVTDWFDEEPFSLVTVVEGELNQEAQQGDSIQRALEALACWDKTWEKRELPVLSDHTISMKNNHAADIMYGHANSRVLWIPRLFIPGNNYALFWYSRNLLMATMQVKSFRDFLVRAADADRIKPGTRLGGYARQIGEIIRNMEKGLKTYRTLSAYRQIQDDKKLQAVLSAIS

SEQ ID NO: 334 - DNA, 1308 bp, Porphyromonas gingivalis
atgataacgctgatggcgggagtgagccaggcaggagaaaagactgatgatcttgtgatggtaaaccttcagtcgacattgactgaattgaatgattttcgtcctggatatatttatctggtggttgctaataagtctgatactctgctcaatgtcgacaggattgaaatcgctgaatatcctgattttattgacgttaaaaagtcatctcttgactccgttgttgtatccagggaaaaaaagagtcttttctatcctgataaaaaaactatcaatgccggtgaatctgaggtttatgaggtgtttatcacggcgtctgatcaggttaagcctggaaaacatcttttgttgttcaatgtgttctacaatggttgggtgtcagctaaatctgagaatgctagtatagcagaaaaatctccaagagatgctctttctccaaaagtaagtaaaacaggtagtcttaccctgagtcatgaacttgatgtcaaggtttttggcgaaaatgagatacttggtgcattatcaaatgctgtcacatttctcatgatgcccggtttcatcatggtcattgtatttgccatggtctggaaaatttcagctccagtttcatatcaagaaaagctgccagcatggtttaaagagacaaaagttgctgatcttcaattctgggtcattgcgattacaatgtcgctcatcatggccagatggctttaccccattctgactcagctgtttacatccggtaggcgaaattatctctatgggtatggattttatgatattgtgatgatgtggggattttctgtgcttgttggaggtttttccggtctgattgccggatgggtggtcagcctctatcgaaaaacaaagtatagcaaagctattcatggggatgagaatccattagagcttctgcaaaaagctgttgttctgggggttaaccagtcatggctgaagaaaatatcagtcaagaagactgggaaatcaggatatatcgtcgagcaggatgctgtcgacaaagattctttatgggtcataccacgaatacaggttacatggcaggcgggtgcggatgaactgaatgaacgatttgaacaggagatatatgatccaaaaacaaagcttgcagttcttctggaaacgcttgccgaaggagagcgacaaaagcaggcaggaaaaggattggaggatatcgattgggaaaaaaacactcggtttatagagcggccattggtggtcaaaaaagcagacttcgattcatgccatgataccgagaatattttttcttgcgatacgtcgaagcaataa

SEQ ID NO: 335 - protein, 435 aa, Porphyromonas gingivalis
MITLMAGVSQAGEKTDDLVMVNLQSTLTELNDFRPGYIYLVVANKSDTLLNVDRIEIAEYPDFIDVKKSSLDSVVVSREKKSLFYPDKKTINAGESEVYEVFITASDQVKPGKHLLLFNVFYNGWVSAKSENASIAEKSPRDALSPKVSKTGSLTLSHELDVKVFGENEILGALSNAVTFLMMPGFIMVIVFAMVWKISAPVSYQEKLPAWFKETKVADLQFWVIAITMSLIMARWLYPILTQLFTSGRRNYLYGYGFYDIVMMWGFSVLVGGFSGLIAGWVVSLYRKTKYSKAIHGDENPLELLQKAVVLGVNQSWLKKISVKKTGKSGYIVEQDAVDKDSLWVIPRIQVTWQAGADELNERFEQEIYDPKTKLAVLLETLAEGERQKQAGKGLEDIDWEKNTRFIERPLVVKKADFDSCHDTENIFSCDTSKQ

SEQ ID NO: 336 - DNA, 1110 bp, Porphyromonas gingivalis
atgccgaattctttacaaaaagtcccaccgataaccctcagcaccctgacaccactctggacaggaggtccacaagcaggagttgtggaccgtattcatgaaaccggaatgatcggaagtcttcggtggtggtttgaagtactggtcagaggtgttggcggaaaagttttgtccccgaatggagaaaagtgtgcaattcttgatctggagaaatataaaaagctcactacccaacaaaaaaacgatccagaaaagctcaaagaatgcggattatgtgatgcctcactgatattcggtgcaaccaactggaaacgaaaatttcggttagaaatcgaggatcacacgagcgatatccatctaggaaatatcagcgttaacacaggttccaacaaaccagcgaaatggttttttaataaccatgcccgtaaaggtaatctcactctgaaaatcatttctctgaccagggacaggaagctgtttgatcctgcaattatcgcagggctagtgcagttcgtcagtgactggggtggactgggagcacgaaaccagatgggattcggaattgtcagaccagagcaagcgcttgatgcccgccctctttatgagcatctcgccaggattcggaagcaagcgacaaatcaacagctcccctcgcttgacaacatgttttttgtgcaactaaaaccacaggatcaaagccggtttgacccagaagcatcatttacattaaaacatgagcttcgaaaaaaaatacaggaggaagaaaaaagaacagctgaattgcaaagcaaaaagcctgatgatactctttcccatttcatcatgggcacaataaagcccgaaaaattagcctctaaaattttcatatcgaggcccttcgataaagatgagacaagcactatccgtctctggggatggttaccgaaacaatccagtcgttacgattcgtcatggaatcggcaaagcatccggcagcttatctatcaacatattgagcaaaactatcacatagaaccggatgactgggttgaactcaatcaccctgatcccaaactgaaaaacagcgaagacaagtttctgaaaacattactgcgcatcgatgagggatag

SEQ ID NO: 337 - protein, 369 aa, Porphyromonas gingivalis
MPNSLQKVPPITLSTLTPLWTGGPQAGVVDRIHETGMIGSLRWWFEVLVRGVGGKVLSPNGEKCAILDLEKYKKLTTQQKNDPEKLKECGLCDASLIFGATNWKRKFRLEIEDHTSDIHLGNISVNTGSNKPAKWFFNNHARKGNLTLKIISLTRDRKLFDPAIIAGLVQFVSDWGGLGARNQMGFGIVRPEQALDARPLYEHLARIRKQATNQQLPSLDNMFFVQLKPQDQSRFDPEASFTLKHELRKKIQEEEKRTAELQSKKPDDTLSHFIMGTIKPEKLASKIFISRPFDKDETSTIRLWGWLPKQSSRYDSSWNRQSIRQLIYQHIEQNYHIEPDDWVELNHPDPKLKNSEDKFLKTLLRIDEG

SEQ ID NO: 338 - DNA, 1080 bp, Porphyromonas gingivalis
atgattcatgactacgccgctttccaatacagccaacttcaggatctggtggaaaaactcgatagaacaagcaaaaatcttgatagccgtaataaaaagataaaaaaagaggctgaaaagttgatcgagaaaatagcatcaaaaacgatcagcattgatccacatacagcatatctctggtttgcagcacaaaccgacacagagcacaatcaaaaactgacctctgcaatacgagaacagtggacgaagagaacgcctcatcagcacctcgaccagcaacatggcatcaggactattcccgatagagacaagcttgacctcctgccaccgttcagctttgtgctgtcattcggctttgaacttcgcaaaccctttctgagcaaggatgacgaagcattccacctgctcgacaatcccgtacgaaaggacaaggtatttaaaactcccgtaatcgcagcatccggctggaagggtgcgcttcgctatgccctgtggcagctcggttatccagaggacagtccatcagttgatcgcctgttcggcaatccccgagaatgcagccagcatgaaaaactgcatgctggacgccttcagtttttctctacccatttcaacagtattgaaaacagtattggatatgaaatcatcacgccgcacgacagagaaacaggaacggtgaatagccgtcagggccccattctgctggaaaccatcagggcagccgagaacaaccaggcagactttactctggcatatattccccttttttacgatagcaatatctataaggaaatcgtcacggacttccatattctggtaagaggcatccatgctatgatgaccgtctatgggtttggagccaaaacaagcagcggattcggagtggcgaaagactccgttcagaaagggagcatttctctggtacttcccgacccggtgatgaaggagataaatgcaacacaggcatcagagggctcaaaagcaaccgtcatggtaaaaccaaaacccttcagcacattaactgagttgagcgcaaccgaaatattaccagatctctcctttgacaaggagggggtatga

SEQ ID NO: 339 - protein, 359 aa, Porphyromonas gingivalis
MIHDYAAFQYSQLQDLVEKLDRTSKNLDSRNKKIKKEAEKLIEKIASKTISIDPHTAYLWFAAQTDTEHNQKLTSAIREQWTKRTPHQHLDQQHGIRTIPDRDKLDLLPPFSFVLSFGFELRKPFLSKDDEAFHLLDNPVRKDKVFKTPVIAASGWKGALRYALWQLGYPEDSPSVDRLFGNPRECSQHEKLHAGRLQFFSTHFNSIENSIGYEIITPHDRETGTVNSRQGPILLETIRAAENNQADFTLAYIPLFYDSNIYKEIVTDFHILVRGIHAMMTVYGFGAKTSSGFGVAKDSVQKGSISLVLPDPVMKEINATQASEGSKATVMVKPKPFSTLTELSATEILPDLSFDKEGV

SEQ ID NO: 340 - DNA, 2943 bp, Porphyromonas gingivalis
atgagcgagcgaaccataccagccgaactgaaactttccgattcacacaggcaagcgatcctatacatagagctccttggactgatccatgacttgggaaaattaactgacacattccttagaaaagaagcaagcaacgcctccaatcaaggcaaaaaatacgagtataggctctttgttgatccgcgaaagctctatacacaagcaaagacatgcaaaaccgttcacaactggcgcaagaacgcagacaataaagcctgtgcatttaacgaccgtcccgatctgaccgatacgctcaggtccgtgaaattgacggcatgggatggcatagaatattgccttgctgaactagctccctttctggccaagacagggttctggaaagacaacgacaaatggatgaaggaactgggaaaaaacatgcaacccggtaccctcatcggctttttgcacggcataggtcattttgaaaaagagtcgtcaggaaacaatcaaacacaagcttatataaacacgtggcgctcgacccctttcggctatgatgaagaacaactccctacaggatcagaaaacaatctaaccaagactctccaacaactgcctctcagtcaggaagagatccaagtagtcgttcaatcagcaaaagagcgagagcaatggcttgaaaaaatggaaaatggcctgagcaaaggactggcagatacacgccgtccgatcaatgatgtaaccctgtgggactgggggtatctggtagcctcactcgccaaagcagcagctcattacctctttcaccaccgctggcctgaatcccctgaacagctctctttccggacactgcgcatcaatctcgacaggcttcaactctatgctgaaagtgacagaataactgacttgctcggaaaacagaatgcaatcgaagaagcgtataaaaaggtacgacagtaccttgaatttgacctggccctcggcaataggatccatcacgatgagacaggagactactacctcattccgggcgtccttcccggggaagacccaaaaacggcattgcgcatagcaatccaaaacatcttcaggaaagaatcactggaagattgtttgccaagggttcatttcggaacctctgtacaggcagggcaccttgataaaaaaaaccagaagaacgccacacgtgacaacaacgctgtcatcgagacgatacgagaactccttgtcaatccaagacgtgatgccagagcagaagctcctgtacagaataataacaacctatccctcttcgaggatgagtggaaaaatggaaaatcggagaatgcagaacgatgcagtgtctgcggactaagacctgtcggctatccggtaacaggagatcttccggaagtagaaaagaatctcgaaccatgggctctggagaaaaaagccaaagaacgcaatctctgtcgtctatgccttaaccgcagaggaagacgagcaaaaaagtgggcagaacaatgggccggagaagcacagcattccaagccgccaatgacaatctggacagatgaagttgccgacgacgacggccggatcgctctgtttgttggcagtttcggactcgatcactggcttgatggttcggctctggaaacaatccgcctatcaaaaaataccggaaaaaatccctcgcctgcaagattattcagaatcaccgaaacagctcgttcattctggacaaccatcaacagtgaggttctgcaagaaaaagtcaacaccgaatcgtgccggattgtccttacaccagctaacactgacaaacttgatctcggaaaattccatacctatgagctacaatgcaacccgcatggtatgcgaatttctttcgtctgggatagtgagcgaggatatttcctgtcagttgaaaacctgaacgggctcatgaaacgtcatggatacaagcagaacatgctctccatgataaccacagtaaagaacacctttgaaaacaaaacatgtactctgtaccagccatcctcatacgggacggcttcatccagaagagcaacaatttgcatcaaaaccgccaatctgagcacaatacactacaaacctgttattccgctactggctgaaccaagcgtatgcatgagcctgataccagccgacaaggctgttgacgtctccctgaaggtatttgagaaataccagcaagagatgagccgggttcaggaccgcctgcccatgggaatcggcctcgtctttttcccccgcagaacacctatacgcgctgttatggaggcaggaagagctatgctgaatatgctgcaaagcaaaccggaagaggaatggaaagtcaatgacctgaaaagacagacaaacaccattgacctcacctttaacaattccatatcgttcagttacaagacatcgtatggcaaagattctgagatacctgatatatggcacctctgctgttttgactctgaaggtaaagcaaaacaactcaacgaactcactacggaaagccatgtaaaagtctatccaggacggtttgatttcgagtttctcgatacaagcggccggcggttcgatatctattatgatgagcacggcagacggccaagaaataccaggcctttttatctgacggatattcaacgcatcgccgacctctggcaatatattcgatccttgagcaagtcacagatctatcaggttatcgaactgatcgaaaccaaacgcacagaatggcacgtcgctcccggaacaaaggatgagcgtacagaggtattcagaaagttcgtccagagtacgcttgccggtgcagaatggccaacaacacactcctggcataccatcagtgaacaggaaacgctggttcaggctggtgtcgacggagttcttacagatgtcgcagaactctatatcagcatactcaaaagcccgtcaacagaaaaccagaaagcatga

SEQ ID NO: 341 - protein, 980 aa, Porphyromonas gingivalis
MSERTIPAELKLSDSHRQAILYIELLGLIHDLGKLTDTFLRKEASNASNQGKKYEYRLFVDPRKLYTQAKTCKTVHNWRKNADNKACAFNDRPDLTDTLRSVKLTAWDGIEYCLAELAPFLAKTGFWKDNDKWMKELGKNMQPGTLIGFLHGIGHFEKESSGNNQTQAYINTWRSTPFGYDEEQLPTGSENNLTKTLQQLPLSQEEIQVVVQSAKEREQWLEKMENGLSKGLADTRRPINDVTLWDWGYLVASLAKAAAHYLFHHRWPESPEQLSFRTLRINLDRLQLYAESDRITDLLGKQNAIEEAYKKVRQYLEFDLALGNRIHHDETGDYYLIPGVLPGEDPKTALRIAIQNIFRKESLEDCLPRVHFGTSVQAGHLDKKNQKNATRDNNAVIETIRELLVNPRRDARAEAPVQNNNNLSLFEDEWKNGKSENAERCSVCGLRPVGYPVTGDLPEVEKNLEPWALEKKAKERNLCRLCLNRRGRRAKKWAEQWAGEAQHSKPPMTIWTDEVADDDGRIALFVGSFGLDHWLDGSALETIRLSKNTGKNPSPARLFRITETARSFWTTINSEVLQEKVNTESCRIVLTPANTDKLDLGKFHTYELQCNPHGMRISFVWDSERGYFLSVENLNGLMKRHGYKQNMLSMITTVKNTFENKTCTLYQPSSYGTASSRRATICIKTANLSTIHYKPVIPLLAEPSVCMSLIPADKAVDVSLKVFEKYQQEMSRVQDRLPMGIGLVFFPRRTPIRAVMEAGRAMLNMLQSKPEEEWKVNDLKRQTNTIDLTFNNSISFSYKTSYGKDSEIPDIWHLCCFDSEGKAKQLNELTTESHVKVYPGRFDFEFLDTSGRRFDIYYDEHGRRPRNTRPFYLTDIQRIADLWQYIRSLSKSQIYQVIELIETKRTEWHVAPGTKDERTEVFRKFVQSTLAGAEWPTTHSWHTISEQETLVQAGVDGVLTDVAELYISILKSPSTENQKA

SEQ ID NO: 342 - DNA, 999 bp, Porphyromonas gingivalis
atgacaacacctgaaacaacaaccaattataagcgtctgacctatctgttcatgtgcaccgatccagttcatgtaggaaccggagggtaccggctcgggcgcgtcgacaacagcattgttcgcgaaccgggaaccaatgtgcccaagattcccggttccagcctgcacggcgccgctcgcacgtatgcggcctccgtctataataaaccgtcctgtgctggtcagggaaaacaaaaacgcaatggtgaacaaacctctaagcagtcgggccattgcggacaagatacttgccaagtgtgctatacattcggttattcgaaaaacactggggaacgctcagcatattcaggaaccgtcaatgtttttgatgcacacatcatcctgtttccggtccattcgctcgaaggtcccgtatggattacgacaacgtcaaggcttaaacggatgatcagcactacgcctgatgatgatctcggtgacccggaacacgaggaaactatcaccccgctctttgagctgaaagaaaactttctcacactgggctggctggtcgtgaatgcagaccccatgaaaaaagttgacaatttgccggatacattaccagaacagattaaaaaacacatcgttctggttcatgaaaatctgttcagccatatcgtcaactccaatctggaaatacggacatctgtcgctattaatccggaacggggggcagcagaagacggggcactctttacctatgaagctatcccccgaacgacaattcttgcagctgatgctgttatcgatgattatcgcaagatgttttcacttgataaccagtctgaaaacaaaacagagaattcaggaaatgatagtgtgaatccccaggaagttctggaaaaaggtctgaatctgatctcatggcttggtatcggcggtatgggaacaaggggattcgggcgtatggaaatgctcggtcaactcgattcgaaacaatacggtggagaaaacctatga

SEQ ID NO: 343 - protein, 332 aa, Porphyromonas gingivalis
MTTPETTTNYKRLTYLFMCTDPVHVGTGGYRLGRVDNSIVREPGTNVPKIPGSSLHGAARTYAASVYNKPSCAGQGKQKRNGEQTSKQSGHCGQDTCQVCYTFGYSKNTGERSAYSGTVNVFDAHIILFPVHSLEGPVWITTTSRLKRMISTTPDDDLGDPEHEETITPLFELKENFLTLGWLVVNADPMKKVDNLPDTLPEQIKKHIVLVHENLFSHIVNSNLEIRTSVAINPERGAAEDGALFTYEAIPRTTILAADAVIDDYRKMFSLDNQSENKTENSGNDSVNPQEVLEKGLNLISWLGIGGMGTRGFGRMEMLGQLDSKQYGGENL

SEQ ID NO: 344 - DNA, 37 bp, Sorangium cellulosum
gtttcaatgccctttgagcaggcatgtcccgttcggg

SEQ ID NO: 345 - DNA, 1203 bp, Sorangium cellulosum
atgagcccattccaccgattgtcgtgcgatttcgaggttctgacccccttgttcctcggcggcgcctcccagcgagccgagctgcgcgtcccgtcgatcaaaggggtgatgcggtcctggtaccgggcgctcgatccggagttcgtgaagcacgagcgcatcctcttcggcaacggcggcggcggcggtaacgacgctcgccagtcgctgctgcgcctgcggtgccggcccggggaacggtcccaggagtccatgcggtggcgcgacgcgcgggccgagcagttcgatcagggcagcggccgacagacgagaaacggcctgacctacctcggattcccgttctcgatgcgaggcaacgacgaacggaccgcgctccggcccggcgcgcggttctcgctggacgtgagctggcaccggcctggtccggaaggccgccagcccctgcgcgtcgcgctggcctcggcgtgggcgctcgggcatttcggatcgctcgggatgcgcgctcgccgagggttcggcgcgctggcgctcaccggctggcgcctcctggacggcggcgggcaaacggtgtccgacgacgacctcgcggcgctgccgctcctgcaccggacggcgggagccgcggagtgggctgcgggcgcgcggcgcggcctcgacgtggtgcgaggctggttcgggcgattcgccgagggcggcgccggcacggcgcgcgaacgccacccgcacttcgggccgagagccgacttcgtggtgggtgccgacaaggcgcggcgcgacgactggcgcggcgctgtcctctcgctcgggcgcgccctccaggatttccggcagcgcacgccgccggactacggcgacgtcaagaaccatgtgctcttcgaggcccgcgagggcggcctccgcatccagcgagccccggcccgcgcgacgtttgggctcccgctcacgtttcgttatggctcggttcccaggggaaagccggtcgcgttcgcgccggtgggtggagagcgacacgggagcttgctgctgctgcggcctgtgctcgcgggggattccctcttcagcctgttcctgcggctggacggcgacgttccgggcatcgacacgccggtggggctccgtggaagcggccgatcgctggcaccggcggcgcagaacgcgatggatgagttcatccgcaagcagaaggggaaggtcgcgtcatga

SEQ ID NO: 346 - protein, 400 aa, Sorangium cellulosum
MSPFHRLSCDFEVLTPLFLGGASQRAELRVPSIKGVMRSWYRALDPEFVKHERILFGNGGGGGNDARQSLLRLRCRPGERSQESMRWRDARAEQFDQGSGRQTRNGLTYLGFPFSMRGNDERTALRPGARFSLDVSWHRPGPEGRQPLRVALASAWALGHFGSLGMRARRGFGALALTGWRLLDGGGQTVSDDDLAALPLLHRTAGAAEWAAGARRGLDVVRGWFGRFAEGGAGTARERHPHFGPRADFVVGADKARRDDWRGAVLSLGRALQDFRQRTPPDYGDVKNHVLFEAREGGLRIQRAPARATFGLPLTFRYGSVPRGKPVAFAPVGGERHGSLLLLRPVLAGDSLFSLFLRLDGDVPGIDTPVGLRGSGRSLAPAAQNAMDEFIRKQKGKVAS

SEQ ID NO: 347 - DNA, 3759 bp, Sorangium cellulosum
atgagcgagcgggatcgagaccgagatcgaaacctcgctgtcgctcatcccgtccacggcaggaccggagatgacgagatcgagcaccatgggacggaggcggatcggacccgcttctggcagcaaaagctccttcagctcctgcacgatcccccgggaaaggcgttcttcctccgacagggcgcgggcggacacaaggcggtcgcggcggatctgttccaggcgacggcgggcgttccgctcaagtatgtacggcccggaccggactgggcggcttcgggcgcggaccggccggtcagctccccgccacgtccagcgcacgtctcggtggactgggtgaagaacccgatcctgacgcaccccctcgcctccgggaccgccgccatcgacctcggccgccgggacctgccagcgtcgcgcgagcaggtgcgagcgctcgccggggacgtcggccgcacgctccgcgagctcctcgagcggcgggtgtcccaggaggacgagctcgacgacctccccgaagaagaggagcgcgagcgcttcctgagcgagcgcgccgagcaggtggaaagcgagctcgccgcactgccccgctggcacgacgacgcgcggctccagcaggcgtgcttgcagctctggcgccgcttgcccgaagagccgccgcccggcgtggccgaggtggtctggcggcaccagcccgcagactcgagggccccggatcacagcctctgggatcacctgcgcgtcacctcgtcgctctcgttcctgagcgggaggaggcgcgaggggcccgtcatgccatggctcctcgccttcagcctcggcccggtgcagcggttcatcgcgcagtcgcggacatccaccgatctctggacgtcatccatgctgctgtcggatctcgtgtggcacgccatggtgccgttcgtcgagcggtacggtccggaggcgatcgtgtaccccgatctgcgggccaacccgcgcgctgacgtgtggctctgggagcaggcgaacggggcggacggagccgcgccgccggcgcacgcggcgcggtaccaggacgtcctgcccgagcagctcaatccgtgctcctacgccgggatcttccccaacacgttcatcgcgctggtcccgctcggcggcgagcgctacctgacgctgctcaaggatctcgcgggcgaggcgcgccgcgccgtcctcggccgctggagacagctcgcggacctcgccaggcgctacttcctggagcaggccgcgaagcgccccgaggccatgagcgactccgagcggaaggccttcgaggccacgtgggcccgccagcacgaggacgtgctcttcacgtcctggtccgcggcggcgtggccgagcatcgagcgcgtcaacgacccggagtcgctggccatccgtgaggcgctcgtcgcgcagcgccccgcccaggcgctcccacgcgaggacgcggaggcgctcgcggcgtggcgcgagcgccacacgacatggatcccgggcgagacgttcgcgcgctacgcggaggcccgttatgtctacgcgcggacgaaccgcaccgtgcaccagtgcgagcgcgggttcgactatccgctcctccatcatgcgctggtgtcgcgccacgggctgcgaaaggcagaggcgcagggcgcggcgatcgcggaggagtccggagagaagtgcacgctctgcgggctgcgccaggccctcggcgccggggacgcgggggcgagcgtggacgcgcagcgcgagacagcgcgcgcgttctggcgccgcttcgaccgcaacagcgacgacggggcggagcgcctctgcgccgtgtgcacgatgaagcgcgtcctcgttcgcgccggcgtcgccacggacgagcgcggcgctcgtcgccgggtgggcctcaccgccgcgtgggcggggccggcgacgccgctcgacgacgtgtgtgatcgcgatgagctgcgggtgccgttcccgtcgacggcgacgatcgctgcccagggctacctgtgcgccgtggccacccgccgggagctgcaggcgcaggtcgccgaggtggtgcggtgttgcgaggacgcgaggctgccgcgcacgagcttcgtgcggtcgctgcgatcgctggccgaggcggcgcagcgcgcggacggcgcggggctgcgcttcctcgagtacgaggcggagctcacggtcttccccgaggtgctcgcggcggccgaggagcgcgccccggagggcggcggccgagagcaaggcgacggcgccgcgcagcgcggcgggctgcgcgatcgcgacggcaagcgcgtcccccggtcgaaggtcgaggccctgcgccgcgccgtggagagcctgcgccgggcagcgaaggagctcgatcgaccggccgggtcggcgcggcgcgccggggaccgcattcccgcgccgggcagccaggtcgcgctgatcgcgctggacggcgaccggatcagccagatcctcctgggcgagaagatcggcgctcgctggcgcgacgtgatccatcccgaggccgtcgcgacgatggagagcaacgaggtcacccgcgcggcccgctggccggagctcctcggtcgcaagcgcctcatggggccatcgacgcacgccttcgtcaaccgcgtgctggccgagttcgcgcacaccatcgtcccctgggtggtggagcgggagttcagcgggaggctcatctacgcgggcggagacgacgtgctcgccatcgccccggcgggcgaggcgctcgacctctgcgcgcggctcgcgcagctctacagcgccgcgtgggtcctcgacacgtcacccggcgaagggccgtgggcgtggcgcgcgaagacctggacgagctccacgtccatccgggccagcgagcgcttcgtcgttgtcgcgccgagcgagaccggagagccgctcccctggccgatccccgaggcgtcgaggcgcgggccgatccctgccggggacgccgcagcggcgagcgccgccgagagcgccgaggagcgcctgctcccgatgatgggcgcgggccagacgctctccgccgggatcgcgatcggccactacaagacctctctcggcggcctggtgaaggccgcctgggacgagcgcgatcgggtgaaaggcgaggacgaggagcgcgattgcgcgaaggaggacaacgaggagcgcatccgggtgaagggcgatgacgaggagcgcgacagggcgacgagggaggacctcgccgtcaagaacgccttctcgatccggcggtacacgcgcgggggcgagaaggcgcggctgcgcctctcctggggacggcgttgcgccgcccccgggaaggcgctcgcaggctacctgcgggtgaaggccgtcatcgagggtttcaagaccggcgcgctccccggaaggcttccgtacaagctgcgcgaggtcgagggagccgtgctcgccgcgtggctcgtcgaggcgaaggcgctgcccggcggcctgacgagccgcgaggcccggcgcgagctcgtgaagcgggtcgagccctttgccaggggcctgttcggggcgcagtgcgcggcggaggtggagggagctttcgagatctggtggcaagggctcctgagcgcgcttcgcgcgcacgagcgacgatggagggcgccggacgcggtgccccctggcgcgacccccgtcgacgacggcgcgccgtcgcgcgggctcggctcggagcaggggctggcggtgtgtcgcttcctgggagcgctcgcccgcggggaggaggacgcgcaatga

SEQ ID NO: 348 - protein, 1252 aa, Sorangium cellulosum
MSERDRDRDRNLAVAHPVHGRTGDDEIEHHGTEADRTRFWQQKLLQLLHDPPGKAFFLRQGAGGHKAVAADLFQATAGVPLKYVRPGPDWAASGADRPVSSPPRPAHVSVDWVKNPILTHPLASGTAAIDLGRRDLPASREQVRALAGDVGRTLRELLERRVSQEDELDDLPEEEERERFLSERAEQVESELAALPRWHDDARLQQACLQLWRRLPEEPPPGVAEVVWRHQPADSRAPDHSLWDHLRVTSSLSFLSGRRREGPVMPWLLAFSLGPVQRFIAQSRTSTDLWTSSMLLSDLVWHAMVPFVERYGPEAIVYPDLRANPRADVWLWEQANGADGAAPPAHAARYQDVLPEQLNPCSYAGIFPNTFIALVPLGGERYLTLLKDLAGEARRAVLGRWRQLADLARRYFLEQAAKRPEAMSDSERKAFEATWARQHEDVLFTSWSAAAWPSIERVNDPESLAIREALVAQRPAQALPREDAEALAAWRERHTTWIPGETFARYAEARYVYARTNRTVHQCERGFDYPLLHHALVSRHGLRKAEAQGAAIAEESGEKCTLCGLRQALGAGDAGASVDAQRETARAFWRRFDRNSDDGAERLCAVCTMKRVLVRAGVATDERGARRRVGLTAAWAGPATPLDDVCDRDELRVPFPSTATIAAQGYLCAVATRRELQAQVAEVVRCCEDARLPRTSFVRSLRSLAEAAQRADGAGLRFLEYEAELTVFPEVLAAAEERAPEGGGREQGDGAAQRGGLRDRDGKRVPRSKVEALRRAVESLRRAAKELDRPAGSARRAGDRIPAPGSQVALIALDGDRISQILLGEKIGARWRDVIHPEAVATMESNEVTRAARWPELLGRKRLMGPSTHAFVNRVLAEFAHTIVPWVVEREFSGRLIYAGGDDVLAIAPAGEALDLCARLAQLYSAAWVLDTSPGEGPWAWRAKTWTSSTSIRASERFVVVAPSETGEPLPWPIPEASRRGPIPAGDAAAASAAESAEERLLPMMGAGQTLSAGIAIGHYKTSLGGLVKAAWDERDRVKGEDEERDCAKEDNEERIRVKGDDEERDRATREDLAVKNAFSIRRYTRGGEKARLRLSWGRRCAAPGKALAGYLRVKAVIEGFKTGALPGRLPYKLREVEGAVLAAWLVEAKALPGGLTSREARRELVKRVEPFARGLFGAQCAAEVEGAFEIWWQGLLSALRAHERRWRAPDAVPPGATPVDDGAPSRGLGSEQGLAVCRFLGALARGEEDAQ

SEQ ID NO: 349 - DNA, 1326 bp, Sorangium cellulosum
atgaccggcgcgccggctcaatcgatgggctttctcgttcgaccggtggactgggtggccttcggcccgccgcgccccaacaccgcgggcgagacgcaccgtcgcgccacggagctgccaggacccacgacattccagggcatcgtgcggacggccctgctcgcggcatccggggatgacttctcggaccgctcgcgcgccgcgcgcgacgcccgcgacgcgctcgtgggcgggcccgacgcgctccccgagggctggcagctcaagggaccgttccttaccgagatcgtggagacaccccacggccccagggcgcggccatgggtgacggcgccgcgctttctcatgggcaccgttcgggagccgagctgcgctcgcctccttcgatcgccggacgtcgacggccgcccgtccgcgctcgacgactcgtcgccggacgcgcctcctctcttgctcggggctccttcgctgaattcggccaaacccaggcacctcggcgggtggctctcgccgcgcgggctgcggtgggcgctcgccggcggcaaacacctggcggagtggcggccggtcgaccatgcgcccgcgcgcgatctcccgccgttcgtgaggcagcaggcgctcgccgggctggagatcgacgcaggcacgggcacggcgcgcgacggcatgctgttcttcgcggacgtgctgcgcttccgtgacaggagcggaatcgcaggatggctctccgcgccgctgccgtcgaggatcccgagcgacgcgctgacccgcggagatctcgcggcgtgcggatggcggagccgccctgcggtcctggaggagctgccgccggtcgacctggacttcgcgcacctgctcgaaggccgacacctgcccgtcgaggtgccggaggatcaagggttcttccttgtggcggcgacgcccgtccagtgcaagggagacggtctgtccgccgccgcgtccgtcgaggaggatctgcgacggaacgcgcggttgcccgagggagtagaggtgcgcgtcctcgccgcgctcaccgggccgccgcgcgtgatcggcggactcctggcagcgtcgaaggtgccccggcccaaccgctcgtactgggaggccgggagcagctggttcttcgtcctgcgcggcggtggcgcgggcgcatccggagccgccgcgcgcggcgaggcgttgcgccgtttgaacgatgcgcacgtcctgggcgaccggggcgaagcgtcgttcggttatggtcacacgctcgtcgccgtgggaccgacggtggacagagggctcgtgcaggcggcggagcgccgccgggaggttcgatcgtga

SEQ ID NO: 350 - protein, 441 aa, Sorangium cellulosum
MTGAPAQSMGFLVRPVDWVAFGPPRPNTAGETHRRATELPGPTTFQGIVRTALLAASGDDFSDRSRAARDARDALVGGPDALPEGWQLKGPFLTEIVETPHGPRARPWVTAPRFLMGTVREPSCARLLRSPDVDGRPSALDDSSPDAPPLLLGAPSLNSAKPRHLGGWLSPRGLRWALAGGKHLAEWRPVDHAPARDLPPFVRQQALAGLEIDAGTGTARDGMLFFADVLRFRDRSGIAGWLSAPLPSRIPSDALTRGDLAACGWRSRPAVLEELPPVDLDFAHLLEGRHLPVEVPEDQGFFLVAATPVQCKGDGLSAAASVEEDLRRNARLPEGVEVRVLAALTGPPRVIGGLLAASKVPRPNRSYWEAGSSWFFVLRGGGAGASGAAARGEALRRLNDAHVLGDRGEASFGYGHTLVAVGPTVDRGLVQAAERRREVRS

SEQ ID NO: 351 - DNA, 993 bp, Sorangium cellulosum
gtgagcgcatggggaagagcagtggtgtgcggcatctacaccgtgagcccgctgcacgtgagcaccggccaggcggaaggggcgatcgacctgccggtgacgaaggagccgcacacggggtttccgatgatcccggcgtcctcgctcaagggagtggcgagggacgccttcgagcacgacgcgaagaaggggaaggacgatacgaagcgagagccggaggtcaacaacgaggtgaacacgctgttcggtccgaagccaaagcgcagcaacggggcggaccgagaggaacagcgaggagaaggctcggccggcgccgcgcccacgtcctcgctcttcgccggggcgctggtgttcaccgaggcccggctcatggcctacgcggcgcgctcgctcaaccgcccttttctgtacgtgacgtgccgcctcgtcctggagcggctgggccgcgacctgcgcgccgccggcatcggcgatctcggcgcgctctcgctccccgcggggtcggccgaggtgctggtcgccgacaaggcgctcgccaaggcgccgctcgtcatcgaagatctcgtctatctggacgcgatcgccgagagcgcggatctcaagaggatcgccgggagcctcgcgcgcctcctccccgacggagaggaggatacccggagtcgggtcgagaaggggctggtcgtgatccccgacggcgacttctccgtgctcgtccggcgccttccggtgcgcgcgcggatccggctggacgacaacaagacgacgagcggggacgatggcaacctatggtacgaggagcaggtgccgtcagactgcctcttcgtatcgatgatcggagcacgccgcggccaaggtgcactcctcgacaagctccaggcgaagagcagcctcctggaggtctcgcagatcggcggcaacgagaccgtcggcgaagggatctgctggtggagggtgggctgcgcgtcggcgacggacggaaagggggccacgtga

SEQ ID NO: 352 - protein, 330 aa, Sorangium cellulosum
MSAWGRAVVCGIYTVSPLHVSTGQAEGAIDLPVTKEPHTGFPMIPASSLKGVARDAFEHDAKKGKDDTKREPEVNNEVNTLFGPKPKRSNGADREEQRGEGSAGAAPTSSLFAGALVFTEARLMAYAARSLNRPFLYVTCRLVLERLGRDLRAAGIGDLGALSLPAGSAEVLVADKALAKAPLVIEDLVYLDAIAESADLKRIAGSLARLLPDGEEDTRSRVEKGLVVIPDGDFSVLVRRLPVRARIRLDDNKTTSGDDGNLWYEEQVPSDCLFVSMIGARRGQGALLDKLQAKSSLLEVSQIGGNETVGEGICWWRVGCASATDGKGAT

SEQ ID NO: 353 - DNA, 501 bp, Sorangium cellulosum
gtgaagccaattgagggcgaagacgccggcgacgaccggcaacggtgcgcgctgaagagcctggcgcgcgatcagcgggcgtacaagcgcgtgatggcgtggcccggacctgtccgtaagagcgccgtcgagctcgcgcaggggtacccggtggagctgcgggcgatgggcacgatgcaggccctggccttctcgatggggaaggccgaggcggggcacggggcgctggcgggcgcaatcgccgactgggtgctctcgcgggagagcggagcgccgctcggccaggccgacgaggcggaccgctctcccgaggagctgctgcggcggctgtcgcgcgcgtcgcgggcggcgtacctcgccgccgatagcgaggcgatcgcgttcgccgacgcgatcaagctcatcggcaaggccatcctgcgcagcgagaaggcggctgagccgcgcggtcgcgacaaggccgctccgcgggccggcaaggccgccccgaggagcggctga

SEQ ID NO: 354 - protein, 166 aa, Sorangium cellulosum
MKPIEGEDAGDDRQRCALKSLARDQRAYKRVMAWPGPVRKSAVELAQGYPVELRAMGTMQALAFSMGKAEAGHGALAGAIADWVLSRESGAPLGQADEADRSPEELLRRLSRASRAAYLAADSEAIAFADAIKLIGKAILRSEKAAEPRGRDKAAPRAGKAAPRSG

SEQ ID NO: 355 - DNA, 840 bp, Sorangium cellulosum
atggcccccgcgatcttctgccaccagcgcgaggccgtggagcagctcctcggggcgaaggagcaggacaagcgagtcgggatcgagcgcatgcggagcgcctccaacgcggggctcgtgtggatccggtacctcgacgtctggggagacggcctcccgccggacatcccccgcagcgccgattcccggggcgcgctgacgacgtttgcgaaggacttcagcgagcgcggaaagctgcccggggccacgcccctgaggttgctgaacgcggttcacgcgaggcaggtgcgcgccatcgagcggctccgcgggtccggggccaccttgcaggcggagctggagagccggttcgcgaccgggctgggtggcccccaccccaccgacatcggcttcacgttcgatcgcagcatcggcgtgccatacctgcctggctcgtccgtcaaggggatcgcccgcgccgcggcgaggctgctcgaagaaccgcggcaagaggagctgttcggcccggagaagatcggatccgacaccaaggcatgggccggcgatgtcgtgttcctcgatgcgtacccggtggcctggcctcggctggaggtcgacgtcatcaattgccaccatcctgcatactacggcggcaaagcaagttatccggcggagaccgaagatccggtccctgtgtacttcctcacggtcgccaaggaaacgacgttcgcgttccgtgtcctgagccgctcgggtgcggcggagcgcgccgcgcgcgccgtcgagctgctgcgcttcgggctgagcgagctcggcgccggagcgaagacggcggtcgggtacggcgccttcaccgggtga

SEQ ID NO: 356 - protein, 279 aa, Sorangium cellulosum
MAPAIFCHQREAVEQLLGAKEQDKRVGIERMRSASNAGLVWIRYLDVWGDGLPPDIPRSADSRGALTTFAKDFSERGKLPGATPLRLLNAVHARQVRAIERLRGSGATLQAELESRFATGLGGPHPTDIGFTFDRSIGVPYLPGSSVKGIARAAARLLEEPRQEELFGPEKIGSDTKAWAGDVVFLDAYPVAWPRLEVDVINCHHPAYYGGKASYPAETEDPVPVYFLTVAKETTFAFRVLSRSGAAERAARAVELLRFGLSELGAGAKTAVGYGAFTG

SEQ ID NO: 357 - DNA, 36 bp, Streptococcus thermophilus
gatataaacctaattacctcgagaggggacggaaac

SEQ ID NO: 358 - DNA, 1005 bp, Streptococcus thermophilus
atgagcgatttatatagtcaaaggtccaattattacctgtccttatctgaacaaagaattatcattaaaaatgataataaagagattgtcaaagaagtgtccatttcactcgttgataatgtattactttttggtaatgcacaactgaccacccaactcatcaaagccttatcaaagaacaaggtgaatgtttactatttctcaaatgttggtcaatttatttctagtattgaaacccacaggcaggacgaattccaaaagcaagagttgcaagcaaaggcttattttgaagaggattttcgtttagaggttgcgaggagtattgctacgaccaaggtgaggcaccaaattgccttacttagagagtttgatacggatggtctactagatacctcagattattctaggtttgaagatagtgtcaatgatattcagaaagcttattccattacagaaattatgggttacgaaggtcgccttgcgaaatcctatttttactatctgaatttactcgttcctgatgactttcattttaatggtaggagtagacggactgcggaggattgttttaacagtgccctcaattttggctatagtatcttatattcttgcttaatggggctgattaagaaaaacgggctaagcttgggatttggggtaattcacaagcatcatcagcatcatgcgaccttggccagtgatttaatggaagaatggagacctatcatcgttgataatacgcttatggagttgatacgaaatggtaaacttcttttaagtcattttgaaaataaggatcaagacttcatactcaccgatgaaggcagagaaatctttgcatgggctttacgttcaagaatattagaagtccatcggtatattgagttagacaaaaaacgctattcttttctttatacagcagataggcaaatcaagagtttgattagggcttttagagaacttgaccctagtctctatgagacaagttacacaggagggcattaa

SEQ ID NO: 359 - protein, 334 aa, Streptococcus thermophilus
MSDLYSQRSNYYLSLSEQRIIIKNDNKEIVKEVSISLVDNVLLFGNAQLTTQLIKALSKNKVNVYYFSNVGQFISSIETHRQDEFQKQELQAKAYFEEDFRLEVARSIATTKVRHQIALLREFDTDGLLDTSDYSRFEDSVNDIQKAYSITEIMGYEGRLAKSYFYYLNLLVPDDFHFNGRSRRTAEDCFNSALNFGYSILYSCLMGLIKKNGLSLGFGVIHKHHQHHATLASDLMEEWRPIIVDNTLMELIRNGKLLLSHFENKDQDFILTDEGREIFAWALRSRILEVHRYIELDKKRYSFLYTADRQIKSLIRAFRELDPSLYETSYTGGH

SEQ ID NO: 360 - DNA, 330 bp, Streptococcus thermophilus
atgggactttactttaacctcagcgaagaagagcgtgagtttgccaaacaaaaaaccatgttttgtctgattatttatgatatccgaagtaacaaacgtagacttaaactctcgaaattacttgagggttatggcgtgagggtgcaaaaatcctgtttcgaggtcaacctgtcaagaaatgattatcagtctctccttaaggatatcgagggcttctacaaggctgatgaagaagacagcataatagtgtatgtgacaaccaaagaagaggtgactagttttagcccctaccatagtgctgaaaaattagatgacattctcttcttctaa

SEQ ID NO: 361 - protein, 109 aa, Streptococcus thermophilus
MGLYFNLSEEEREFAKQKTMFCLIIYDIRSNKRRLKLSKLLEGYGVRVQKSCFEVNLSRNDYQSLLKDIEGFYKADEEDSIIVYVTTKEEVTSFSPYHSAEKLDDILFF

SEQ ID NO: 362 - DNA, 732 bp, Streptococcus thermophilus
atgaaaaaattagtatttacttttaaaaggatcgaccatcctgcacaagatttggctgttaaatttcatggcttcttgatggagcagttggatagtgactatgttgattatctgcatcagcagcaaacaaatccctatgcgaccaaggtaatccaagggaaagaaaacacgcagtgggttgtacatctgctcacagacgacatcgaggataaggtttttatgaccttattacagattaaagaggtgtccttaaacgatctgcctaaactcagtgtcgaaaaagttgagattcaggagttggggacagataaactgttagagattttcaatagtgaggaaaatcaaacctatttttcaattatttttgagactccaacaggttttaaatctcaaggttcctacgtcatcttcccgtctatgcgtttgatttttcaaagtttgatgcaaaagtatggaaggttggttgaaaatcaacctgaaattgaagaggataccttagattacctatctgaacacagcactatcacgaattatcgcttggagacgagttatttcagggtgcacaggcaacgaattcctgcctttagaggaaagttaacctttaaagtacaaggcgccaaaactctaaaagcttatgtcaaaatgcttctaacattcggtgaatattcaggtcttggcatgaaaacgagtctcggtatgggagggataaagcttgaagaaagaaaagattga

SEQ ID NO: 363 - protein, 243 aa, Streptococcus thermophilus
MKKLVFTFKRIDHPAQDLAVKFHGFLMEQLDSDYVDYLHQQQTNPYATKVIQGKENTQWVVHLLTDDIEDKVFMTLLQIKEVSLNDLPKLSVEKVEIQELGTDKLLEIFNSEENQTYFSIIFETPTGFKSQGSYVIFPSMRLIFQSLMQKYGRLVENQPEIEEDTLDYLSEHSTITNYRLETSYFRVHRQRIPAFRGKLTFKVQGAKTLKAYVKMLLTFGEYSGLGMKTSLGMGGIKLEERKD

SEQ ID NO: 364 - DNA, 381 bp, Streptococcus thermophilus
atgacaatcttgactgatgagaattacgttgatattgcagaaaaagcaattctaaaactagaaagaaatacaaggaacagaaagaatcctgatgccttctttcttacaacaagtaagctcagaaacttgctgagcttaactagtacactttttgatgagagtaaggtcaaagaatatgatgatctccttgatcgtattgcttatttaagagtacaatttgtctatcaagcaggtagagagattgcagtaaaagatctgatagaaaaggctcaaattcttgaggctcttaaggaaatcaaagatagagagacacttcaaagattttgtagatatatggaagcattagtagcctatttcaagttttatggaggtaaagattaa

SEQ ID NO: 365 - protein, 126 aa, Streptococcus thermophilus
MTILTDENYVDIAEKAILKLERNTRNRKNPDAFFLTTSKLRNLLSLTSTLFDESKVKEYDDLLDRIAYLRVQFVYQAGREIAVKDLIEKAQILEALKEIKDRETLQRFCRYMEALVAYFKFYGGKD

SEQ ID NO: 366 - DNA, 663 bp, Streptococcus thermophilus
atgacattcgctaagattaaattttcagctcaaattcgtttagagacaggcctccatattggtggaagcgatgcttttgcagccattggtgcaatcgattcgcctgttattaaagatcctattaccaacataccgatcattcctggttcaagtctcaaaggaaaaatgagaacgcttcttgccaaggtttataatgaaaaagtagctgagaaaccaagcgatgacagtgatattcttagccgtttatttgggaatagtaaagataaacgattcaaaatgggacgcttgatttttcgtgatgccttcttgtcaaacgctgatgagctagactctcttggggtaagaagttatacagaagtaaaatttgaaaatacaattgaccgtatcactgccgaagctaatccaagacaaattgaacgtgctattcgtaacagtacttttgatttcgagttgatttatgaaattacagatgagaatgaaaatcaagtcgaagaagatttcaaagtgattcgagatggtttaaaactgcttgaacttgattatcttggtggttctggatctcgaggttacggtaaggttgcttttgaaaaactcaaagctactaccgtatttggtaattatgatgttaaaacattaaatgaacttttaactgcggaggtctaa

SEQ ID NO: 367 - protein, 220 aa, Streptococcus thermophilus
MTFAKIKFSAQIRLETGLHIGGSDAFAAIGAIDSPVIKDPITNIPIIPGSSLKGKMRTLLAKVYNEKVAEKPSDDSDILSRLFGNSKDKRFKMGRLIFRDAFLSNADELDSLGVRSYTEVKFENTIDRITAEANPRQIERAIRNSTFDFELIYEITDENENQVEEDFKVIRDGLKLLELDYLGGSGSRGYGKVAFEKLKATTVFGNYDVKTLNELLTAEV

SEQ ID NO: 368 - DNA, 900 bp, Streptococcus thermophilus
atgacctataaactgtatattatgacctttcagaatgctcattttggttcgggcactcttgatagctcaaaattaacattctcagcagaccgtatcttctcagcactagtgctagaatccctaaaaatgggaaaactcgatgcatttcttgcggaagctaaccaagacaagttcacgctcacagatgcctttccatttcaatttggtccctttttgccgaaacctattggttatcccaaacatgaccaaatagatcaatcagttgatgtcaaagaggttcgccgtcaagcaaaattgtctaagaaactgcaatttcttgctctagaaaatgttgacgattatctcaatggagagttatttgaaaatgaagagcatgcagtcattgatactgtgacaaaaaatcaaccacataaggatggcaatctttatcaggtagctacaactagattttcaaatgatacgtcgctttacgtcatcgcaaacgaatctgatttgcttaatgagttgatgtctagtcttcagtattcaggtcttggtggaaagcgttcaagtggttttggtcgttttgagttagatattcaaaatatcccactagaattgtcagatagactgactaagaatcattcagataaagtgatgagtcttacgacagcacttcctgtagatgctgaccttgaagaagcaatggaagatggacattacttattaactaaatcaagtggttttgcatttagtcatgctaccaatgagaattatcgtaagcaggatctttacaaatttgcttctggttcaacttttagtaaaacatttgaaggtcagattgttgatgtgagaccacttgatttccctcatgctgttttaaattatgctaaaccactcttctttaaattggaggtataa

SEQ ID NO: 369 - protein, 299 aa, Streptococcus thermophilus
MTYKLYIMTFQNAHFGSGTLDSSKLTFSADRIFSALVLESLKMGKLDAFLAEANQDKFTLTDAFPFQFGPFLPKPIGYPKHDQIDQSVDVKEVRRQAKLSKKLQFLALENVDDYLNGELFENEEHAVIDTVTKNQPHKDGNLYQVATTRFSNDTSLYVIANESDLLNELMSSLQYSGLGGKRSSGFGRFELDIQNIPLELSDRLTKNHSDKVMSLTTALPVDADLEEAMEDGHYLLTKSSGFAFSHATNENYRKQDLYKFASGSTFSKTFEGQIVDVRPLDFPHAVLNYAKPLFFKLEV

SEQ ID NO: 370 - DNA, 1074 bp, Streptococcus thermophilus
atgaaaaatgactatagaacatttaaattaagcctcctgacacttgctccaattcatattggtaatggagagaagtatacctctagagaatttatctatgaaaataagaagttttactttcctgacatggggaaattctataataaaatggtggagaagaggcttgctgaaaagtttgaagcatttctaattcaaactcgtccaaatgcacgtaataatcgtcttatttccttcttaaatgataaccgaattgcagagcgttcttttggaggttatagtatctctgaaacaggtttagaatcggacagaaatcctaattcagccggagctattaacgaagttaataaatttattcgagatgcttttggaaatccctacattcctggtagctcactaaaaggtgctattcgtaccattttaatgaatactacccctaagtggaataatgaaaatgctgtaaatgactttggaagatttccgaaagagaataagaaccttatcccttggggaccaaaaaagggaaaagaatacgatgatttgtttaacgcaattcgtgtgagtgatagtaagccttttgataataagagtcttatcttagtacagaaatgggattattcagcgaaaacaaataaagctaaaccacttcccttgtatagagaatcaatctctccattaacaaaaattgaatttgagattacaacaactactgatgaagctggaagattgattgaagaattaggtaagagagcacaagcgttttataaagactataaagcatttttcctatctgaatttcctgatgataagattcaagccaatctacaatacccaatttatttaggtgcggggagcggtgcttggacaaagactctatttaagcaagctgatggtattttacaaagacgatacagtcgaatgaaaactaaaatggttaaaaaaggagttcttaagctcacaaaagcacctcttaaaacagttaagattccatctggtaatcattcattagtcaagaaccacgagtccttttatgaaatgggaaaagctaatttcatgattaaggagattgataaatga

SEQ ID NO: 371 - protein, 357 aa, Streptococcus thermophilus
MKNDYRTFKLSLLTLAPIHIGNGEKYTSREFIYENKKFYFPDMGKFYNKMVEKRLAEKFEAFLIQTRPNARNNRLISFLNDNRIAERSFGGYSISETGLESDRNPNSAGAINEVNKFIRDAFGNPYIPGSSLKGAIRTILMNTTPKWNNENAVNDFGRFPKENKNLIPWGPKKGKEYDDLFNAIRVSDSKPFDNKSLILVQKWDYSAKTNKAKPLPLYRESISPLTKIEFEITTTTDEAGRLIEELGKRAQAFYKDYKAFFLSEFPDDKIQANLQYPIYLGAGSGAWTKTLFKQADGILQRRYSRMKTKMVKKGVLKLTKAPLKTVKIPSGNHSLVKNHESFYEMGKANFMIKEIDK

SEQ ID NO: 372 - DNA, 96 bp, Streptococcus thermophilus
atgagagtacttatatcagctgtaggtgacacagacccttttagaaattttcatgatggcgccttaattcatatcaaacaagaatatcggtcatga

SEQ ID NO: 373 - protein, 31 aa, Streptococcus thermophilus
MRVLISAVGDTDPFRNFHDGALIHIKQEYRS

SEQ ID NO: 374 - DNA, 597 bp, Streptococcus thermophilus
ttgaagaaaactgctcgagattttattgagaagtttgattataaggcggcactagatattctagaccaattatcagatttcccgaatttaaaaagtcttagagaagaaatccgtgatgttgtcaactgtctgtctaaaaagaaaatcgcttatattcgtgagaaactatacgatttttcacgagttttcaaaaatcagtctattctttcagatatcctatcgtttcctctcgatgactcccaagagaaggctttgaattactatttgatgattgatgttttaaaagaacgtgagcatattgctgatgtcttaattaaggcaaaatcactagctgaatttgtcatcgaagaaaccatcaaaaaagatcatgagggcttaattgtatttgatggcaatctgccaaaacttaatccaagttttcctgataaagttgctcacggtttgtcagaaattgatacgcgattattaagtcgtaagaagttaaaacaactttctgaaaacttgcaattgcttcttgttgattgtttgggtattgattcaagctattttaactactatgacaaacaaaataaagagcttacaaagatgcttgaatag

SEQ ID NO: 375 - protein, 198 aa, Streptococcus thermophilus
MKKTARDFIEKFDYKAALDILDQLSDFPNLKSLREEIRDVVNCLSKKKIAYIREKLYDFSRVFKNQSILSDILSFPLDDSQEKALNYYLMIDVLKEREHIADVLIKAKSLAEFVIEETIKKDHEGLIVFDGNLPKLNPSFPDKVAHGLSEIDTRLLSRKKLKQLSENLQLLLVDCLGIDSSYFNYYDKQNKELTKMLE

SEQ ID NO: 376 - DNA, 36 bp, Streptococcus thermophilus; identical to SEQ ID NO: 357

SEQ ID NO: 377 - DNA, 624 bp, Streptococcus thermophilus
atgagcgatttatatagtcaaaggtccaattattacctgtccttatctgaacaaagaattatcattaaaaatgataataaagagattgtcaaagaagtgtccatttcactcgttgataatgtattactttttggtaatgcacaactgaccacccaactcatcaaagccttgtcaaagaacaaggtgaatgtttactatttctcaaatgttggtcaatttatttctagtattgaaacccacaggcaggacgaattccaaaagcaagagttgcaagcaaaggcttattttgaagaggatttccgtttagaggttgcgaggagtattgctacgaccaaggtgaggcacccaattgccttacttagagagtttgatacggatggtctactagatacctcagattattctaggtttgaagatagtgtcaatgatattcagaaagcttattccattacagaaattatgggttacgaaggtcgccttgcgaaatcctatttttactatctgaatttactcgttcctaatgactttcattttaatggtaggagtagacggcctggggaggattgttttaacagtgccctcaattttggctatagtatcttatattcttgcttaatgggctga

SEQ ID NO: 378 - protein, 207 aa, Streptococcus thermophilus
MSDLYSQRSNYYLSLSEQRIIIKNDNKEIVKEVSISLVDNVLLFGNAQLTTQLIKALSKNKVNVYYFSNVGQFISSIETHRQDEFQKQELQAKAYFEEDFRLEVARSIATTKVRHPIALLREFDTDGLLDTSDYSRFEDSVNDIQKAYSITEIMGYEGRLAKSYFYYLNLLVPNDFHFNGRSRRPGEDCFNSALNFGYSILYSCLMG

SEQ ID NO: 379 - DNA, 396 bp, Streptococcus thermophilus
ttgcttaatgggctgattaagaaaaacgggctaagcttgggatttggggtaattcacaagcatcatcagcatcatgcgaccttggccagtgatttaatggaagaatggagacctatcatcgtcgataatacgcttatggagttggtacgaaatggtaaacttcttttaagtcattttgaaaataaggatcaagacttcatactcacccatgaaggcagagaaatctttgcacgggctttacgttcaagaatattagaagtccatcagtatattgagttagataaaaaacgctattcttttctttatacagcagataggcaaatcaagagtttgattagggcttttagagaacttgaccctagtctctatgagacaagttacacaggagggcattaa

SEQ ID NO: 380 - protein, 131 aa, Streptococcus thermophilus
MLNGLIKKNGLSLGFGVIHKHHQHHATLASDLMEEWRPIIVDNTLMELVRNGKLLLSHFENKDQDFILTHEGREIFARALRSRILEVHQYIELDKKRYSFLYTADRQIKSLIRAFRELDPSLYETSYTGGH

SEQ ID NO: 381 - DNA, 330 bp, Streptococcus thermophilus
atgggactttactttaacctcagcgaagaagagcgtgagtttgccaaacaaaaaaccatgttttgtctgattatttatgatattcgaagtaacaaacgtagacttaaactctcgaaattacttgagggttatggcgtgagggtgcaaaaatcctgtttcgaagtcaacctgtcaagaaatgattatcagtctctccttaaggatatcgagggcttctacaaggctgatgaagaagacagcataatagtgtatgtgacaaccaaagaagaggtgactagttttagcccctaccatagtgctgaaaaattagatgacattctcttcttctaa

SEQ ID NO: 382 - protein, 109 aa, Streptococcus thermophilus; identical to SEQ ID NO: 361

SEQ ID NO: 383 - DNA, 732 bp, Streptococcus thermophilus
atgaaaaaattagtatttacttttaaaaggatcgaccatcctgcacaagatttggctgttaaatttcatggcttcttgatggagcagttggatagtgactatgttgattatctgcatcagcagcaaacaaatccctatgcgaccaaggtaatccaagggaaagaaaacacgcagtgggttgtacatctgctcacagacgacatcgaggataaggtttttatgaccttattacagattaaagaggtgtccttaaacgatctgcctaaactcagtgtcgaaaaagttgagattcaggagttgggggcagataaactgttagagattttcaatagtgaggaaaatcaaacctatttttcaattatttttgagactccaacaggttttaaatctcaaggttcctacgtcatcttcccgtctatgcgtttgatttttcaaagtttgatgcaaaagtatggaaggttggttgaaaatcaacctgaaattgaagaggataccttagattacctatctgaacacagcactatcacgaattatcgcttggagacgagttatttcagggtgcacaggcaacgaattcctgcctttagaggaaagttaacctttaaagtacaaggcgcccaaactctaaaagcttatgtcaaaatgcttctaacattcggtgaatattcaggtcttggcatgaaaacgagtctcggtatgggagggataaagcttgaagaaagaaaagattga

SEQ ID NO: 384 - protein, 243 aa, Streptococcus thermophilus
MKKLVFTFKRIDHPAQDLAVKFHGFLMEQLDSDYVDYLHQQQTNPYATKVIQGKENTQWVVHLLTDDIEDKVFMTLLQIKEVSLNDLPKLSVEKVEIQELGADKLLEIFNSEENQTYFSIIFETPTGFKSQGSYVIFPSMRLIFQSLMQKYGRLVENQPEIEEDTLDYLSEHSTITNYRLETSYFRVHRQRIPAFRGKLTFKVQGAQTLKAYVKMLLTFGEYSGLGMKTSLGMGGIKLEERKD

SEQ ID NO: 385 - DNA, 2277 bp, Streptococcus thermophilus
ttgaagaaagaaaagattgatttattttacggagctcttttgcatgatatcggtaaggtcattcaaagggcgacaggagaacgaaaaaaacacgccttggtaggcgcggattggtttgatgagattgctgataatcaagttatttccgatcaaattagatatcacatggctaactaccagagtgataaacttggaaatgaccatcttgcttacataacttatatcgctgataacattgcctctggtgtcgacagaagacagtcaaatgaggagagtgacgaggatacatcagctaagatttgggatacctatacaaaccaggctgatatttttaacgtttttggggcacaaacggataaacgctactttaaaccgacggttctaaacttgaaatctaaacctaactttgcgtcggcaacatatgaacctttctcaaaaggtgattatgcggcaattgcgactcgtatcaaaaatgaattggcagaatttgagtttaatcaagtacaaattgactctttgttaaatctgttcgaagcaaccctctcttttgtgccttcttcgactaatactaaagaaatcgctgatatttcacttgctgatcatagtcgtctgacagcagcttttgctctagccatctatgattacttggaagacaaaggtcgtcataactataaggaggacttgtttactaaagcatcagccttttatgaggaagaagcttttctcctagctagctttgacttatcagggattcaagactttatctataatattaatattgcgacgaatggtgctgctaaacaattgaaggctagatctttatatcttgactttatgagcgagtatatagcagacagtttacttgataaactaggcctcaatcgggctaatatgctctatgtcggtgggggacatgcttactttgtcctagccaatactgaaaaaacggtagaaacactcgttcaatttgaaaaagatttcaatcaatttttattggcaaatttccaaaccagattatatgttgcctttggttggggaagctttgcggctaaggatatcatgagcgaactgaactcacctgaaagctatagacaggtctatcaaaaggctagtcgcatgatttctgagaaaaaaatctcaaggtatgattatcaaacccttatgttgttgaacaggggcggtaaatcttctgaaagagagtgcgagatttgtcattccgttgagaatttagttgcttatcatgaccaaaaagtgtgtgacatttgtcgaggcttgtatcaattttctaaagagattgcccatgaccatttcattatcactgaaaatgaagggcttcctattggtccgaacgcatgtcttaagggtgttgcatttgaaaagctgagccaagaagctttttcccgtgtctatgtcaaaaatgactataaggctggtacagttaaggcaacccatgtttttgttggagattaccagtatgatgaaatatacaattatgctgccttatctaaaaacgaaaatgggttaggtattaaacgtttagctgttgtacgtcttgacgtggatgatttgggagcagcctttatggctggcttctcccaacaaggaaatgggcaatatagtactctatcacgctcagccactttctctcgaagcatgagtcttttcttcaaggtttatattaaccagtttgctagtgataagaagctctctatcatctatgccggtggggatgatgtttttgctattggctcttggcaagatattattgcctttactgttgaacttcgtgagaacttcattaaatggacaaatggaaaactaacactatcagctggtatcggtctgtttgctgataagacccctattagcttaatggcacatcaaacaggggagctagaagaaacagctaaaggcaatgagaaagatagtatttcactctttagttccgactatacctttaaatttgatcggtttatcactaatgtttacgacgataagttagagcagattcgctatttctttaatcaccaagatgaacgaggcaagaatttcatttataaattgattgaattgcttcgaaattatgatcgtatgaatatggcacgtttagcttattatttaacacgacttgaagaattgacgcgtgaaacagacagggataaatttaaaacatttaaaaatttattctattcttggtacacaaataaggatgataaggatagaaaagaagcagagttagccttgcttctctatatctatgagattagaaaggattag

SEQ ID NO: 386 - protein, 758 aa, Streptococcus thermophilus
MKKEKIDLFYGALLHDIGKVIQRATGERKKHALVGADWFDEIADNQVISDQIRYHMANYQSDKLGNDHLAYITYIADNIASGVDRRQSNEESDEDTSAKIWDTYTNQADIFNVFGAQTDKRYFKPTVLNLKSKPNFASATYEPFSKGDYAAIATRIKNELAEFEFNQVQIDSLLNLFEATLSFVPSSTNTKEIADISLADHSRLTAAFALAIYDYLEDKGRHNYKEDLFTKASAFYEEEAFLLASFDLSGIQDFIYNINIATNGAAKQLKARSLYLDFMSEYIADSLLDKLGLNRANMLYVGGGHAYFVLANTEKTVETLVQFEKDFNQFLLANFQTRLYVAFGWGSFAAKDIMSELNSPESYRQVYQKASRMISEKKISRYDYQTLMLLNRGGKSSERECEICHSVENLVAYHDQKVCDICRGLYQFSKEIAHDHFIITENEGLPIGPNACLKGVAFEKLSQEAFSRVYVKNDYKAGTVKATHVFVGDYQYDEIYNYAALSKNENGLGIKRLAVVRLDVDDLGAAFMAGFSQQGNGQYSTLSRSATFSRSMSLFFKVYINQFASDKKLSIIYAGGDDVFAIGSWQDIIAFTVELRENFIKWTNGKLTLSAGIGLFADKTPISLMAHQTGELEETAKGNEKDSISLFSSDYTFKFDRFITNVYDDKLEQIRYFFNHQDERGKNFIYKLIELLRNYDRMNMARLAYYLTRLEELTRETDRDKFKTFKNLFYSWYTNKDDKDRKEAELALLLYIYEIRKD

SEQ ID NO: 387 - DNA, 381 bp, Streptococcus thermophilus
atgacaatcttgactgatgagaattacgttgatattgcagaaaaagcaattctaaaactagaaagaaatactaggaacagaaagaatcctgatgccttctttcttacaacaagtaagctcagaaacttgctgagcttaactagtacactttttgatgagagtaaggtcaaagaatatgatgctctccttgatcgtattgcttatttaagagtacaatttgtctaccaagcaggtagagagattgcagtaaaagatctgatagaaaaggctcaaattcttgaggctcttaaggaaatcaaagatagagagacacttcaaagattttgtagatatatggaagcattagtagcctatttcaagttttatggaggtaaagattaa

SEQ ID NO: 388 - protein, 126 aa, Streptococcus thermophilus
MTILTDENYVDIAEKAILKLERNTRNRKNPDAFFLTTSKLRNLLSLTSTLFDESKVKEYDALLDRIAYLRVQFVYQAGREIAVKDLIEKAQILEALKEIKDRETLQRFCRYMEALVAYFKFYGGKD

SEQ ID NO: 389 - DNA, 663 bp, Streptococcus thermophilus
atgacattcgctaagattaaattttcagctcaaattcgtttagagacaggcctccatattggtggaagcgatgcttttgcagccattggtgcaatcgattcgcctgttattaaagatcctattaccaacctaccgatcattcctggttcaagtctcaaaggaaaaatgagaacgcttcttgccaaggtttataatgaaaaggtagctgagaaaccaagcgatgacagtgatattcttagccgtttatttgggaatagtaaagataaacgattcaaaatgggacgcttgatttttcgtgatgccttcttgtcaaacgctgatgagctagactctcttggggtaagaagttatacagaagtaaaatttgaaaatacaattgaccgtatcactgccgaagctaatccaagacaaattgaacgtgctattcgtaccagtacttttgatttcgagttgatttatgaaattacagatgagaatgaaaatcaagtcgaagaagatttcaaagtgattcgagatggtttaaaactgcttgaacttgattatcttggtggttctggatctcgaggttacggtaaggttgcttttgaaaaactcaaagctactaccgtatttggtaattatgatgttaaaacattaaatgaacttttaactgcggaggtctaa

SEQ ID NO: 390 - protein, 220 aa, Streptococcus thermophilus
MTFAKIKFSAQIRLETGLHIGGSDAFAAIGAIDSPVIKDPITNLPIIPGSSLKGKMRTLLAKVYNEKVAEKPSDDSDILSRLFGNSKDKRFKMGRLIFRDAFLSNADELDSLGVRSYTEVKFENTIDRITAEANPRQIERAIRTSTFDFELIYEITDENENQVEEDFKVIRDGLKLLELDYLGGSGSRGYGKVAFEKLKATTVFGNYDVKTLNELLTAEV

SEQ ID NO: 391 - DNA, 900 bp, Streptococcus thermophilus
atgacctataaactgtatattatgacctttcagaatgctcattttggttcgggcactcttgatagctcaaaattaacattctcagcagaccgtatcttctcagcactagtgctagaatccctaaaaatgggaaaactcgatgcatttcttgcggaagctaaccaagacaagttcacgctcacagatgcctttccatttcaatttggtccctttttgccgaaaccgattggttatcccaaacatgaccaaatagatcaatcagttgatgtcaaagaggttcgccgtcaagcaaaattgtctaagaaactgcaatttcttgctctagaaaatgttgacgattatctcaatggagagttatttgaaaatgaagagcatgcagtcatcgatactgtgacaaaaaatcaaccacataaggacggcaatctttatcaggtagctacaaccagattttcaaatgatacgtcgctttacgtcatcgcaaacgaatctgatttgcttaatgagttgatgtctagtcttcagtattcaggtcttggtggaaagcgttcaagtggttttggtcgttttgagttagatattcaaaatatcccactagaattgtcagatagactgactaagaatcattcagataaagtgatgagtcttacgacagcacttcctgtagatgctgaccttgaagaagcaatggaagatggacattacttattaactaaatcaagtggttttgcatttagtcatgctaccaatgagaattatcgtaagcaggatctttacaaatttgcttctggttcaacttttagtaaaacatttgaaggtcagattgttgatgtgagaccacttgatttccctcatgctgttttaaattatgctaaaccactcttctttaaattggaggtataa

SEQ ID NO: 392 - protein, 299 aa, Streptococcus thermophilus; identical to SEQ ID NO: 369

SEQ ID NO: 393 - DNA, 1074 bp, Streptococcus thermophilus
atgaaaaatgactatagaacatttaaattaagcctcctgacacttgctccaattcatattggtaatggagagaagtatacctctagagaatttatctatgaaaataagaagttttactttcctgacatggggaaattctataataaaatggtggagaagaggcttgctgaaaagtttgaagcatttctaattcaaactcgtccaaatgcacgtaataatcgtcttatttccttcttaaatgataaccgaattgcagagcgttcttttggaggttatagtatctctgaaacaggtttagaatcggacaaaaatcctgattcagccggagctattaacgaagttaataaatttattcgagatgcttttggaaatccctacattcctggtagctcactaaaaggtgctattcgtaccattttaatgaatactacccctaagtggaataatgaaaatgctgtaaatgactttggaagatttccgaaagagaataagaaccttatcccttggggaccaaaaaagggaaaagaatacgatgatttgtttaacgcaattcgtgtgagtgatagtaagccttttgataataagagtcttatcttagtgcagaaatgggattattcagcgaaaacaaataaagctaaaccacttcccttgtatagagaatcaatctctccattaacaaaaattgaatttgagattacaacaaccactgatgaagctggaagattgattgaagaattaggtaagagagcacaagcgttttataaagactataaggcatttttcctatctgaatttcctgatgataagattcaagccaatctacaatacccaatttatttaggtgcggggagcggtgcttggacaaagactctatttaagcaagctgatggtattttacaaagacgatacagtcgaatgaaaactaaaatggttaaaaaaggagttcttaagctcacaaaagcacctcttaaaacagttaagattccatctggtaatcattcattagtcaagaaccacgagtccttttatgaaatgggaaaagctaatttcatgattaaggagattgataaatga

SEQ ID NO: 394 - protein, 357 aa, Streptococcus thermophilus
MKNDYRTFKLSLLTLAPIHIGNGEKYTSREFIYENKKFYFPDMGKFYNKMVEKRLAEKFEAFLIQTRPNARNNRLISFLNDNRIAERSFGGYSISETGLESDKNPDSAGAINEVNKFIRDAFGNPYIPGSSLKGAIRTILMNTTPKWNNENAVNDFGRFPKENKNLIPWGPKKGKEYDDLFNAIRVSDSKPFDNKSLILVQKWDYSAKTNKAKPLPLYRESISPLTKIEFEITTTTDEAGRLIEELGKRAQAFYKDYKAFFLSEFPDDKIQANLQYPIYLGAGSGAWTKTLFKQADGILQRRYSRMKTKMVKKGVLKLTKAPLKTVKIPSGNHSLVKNHESFYEMGKANFMIKEIDK

SEQ ID NO: 395 - DNA, 117 bp, Streptococcus thermophilus
ttgttttctattgctcctaattatgagcctgaactcataattcatgatcccattattagtgataatgaggttcatatttttgatgtgatgtttcaacgtttctctgatattttgtaa

SEQ ID NO: 396 - protein, 38 aa, Streptococcus thermophilus
MFSIAPNYEPELIIHDPIISDNEVHIFDVMFQRFSDIL

SEQ ID NO: 397 - DNA, 1029 bp, Streptococcus thermophilus
ttgaatctttctagtgcaacaccacaaatcaaatctgctctatttgtgattaatcgtttaaatggtatcaatgtcaaagcggttaaagtttcgagtcccgaacacgcttcaaacgagaatatcggtcatgataatgatgagaatatcgatgaactcatcaaagtcaatgaagataataaagtcaatttcattgatcgaacgattgaagataatgccgaaaaatttagtcaggctctattgaagaaaactgctcgagattttattgagaagtttgattataaggcggcactagatattctagaccaattatcagatttcccgaatttaaaaagtcttagagaagaaatccgtgatgttgtcaactgtctgtctaaaaagaaaatcgcttatattcgtgagaaactatacgatttttcacgagttttcaaaaatcagtctattctttcagatatcctatcgtttcctctcgatgactcccaaaagaaggctttgaattactatttgatgattgatgttttaaaagaacgtgagcatattgctgatgtcttaattaaggcaaaatcactagctgaatttgtcatcgaagaaatcatcaaaaaagatcatgagggcttaattgtatttgatggcaatctgccaaaacttaatccaagttttcctgattgtgaggcaattttagacgatattgataagaaaatgaaaaaatctaggggtattgaagacactgaagaacgcattttttcagtacaatctacactcaatctattatcttacctgaatatccttgagttctatgaatatgattctcagcttcagacagcgattaatggcattttaagtttgaatggtgaacgaaataaagttgctcacggtttgtcagaaattgatacgcgattattaagtcgtaagaagttaaaacaactttctgaaaacttgcgattgcttcttgttgattgtttgggtattgattcaagctattttaattactatgacaaacaaaataaagagcttacaaagatgcttgaatag

SEQ ID NO: 398 - protein, 342 aa, Streptococcus thermophilus
MNLSSATPQIKSALFVINRLNGINVKAVKVSSPEHASNENIGHDNDENIDELIKVNEDNKVNFIDRTIEDNAEKFSQALLKKTARDFIEKFDYKAALDILDQLSDFPNLKSLREEIRDVVNCLSKKKIAYIREKLYDFSRVFKNQSILSDILSFPLDDSQKKALNYYLMIDVLKEREHIADVLIKAKSLAEFVIEEIIKKDHEGLIVFDGNLPKLNPSFPDCEAILDDIDKKMKKSRGIEDTEERIFSVQSTLNLLSYLNILEFYEYDSQLQTAINGILSLNGERNKVAHGLSEIDTRLLSRKKLKQLSENLRLLLVDCLGIDSSYFNYYDKQNKELTKMLE

SEQ ID NO: 399 - DNA, 36 bp, Synechococcus sp
gtttctcttcacctgagaagcaaatagattggaaac

SEQ ID NO: 400 - DNA, 1947 bp, Synechococcus sp
atggtatacaacagaccgcagccacctcgtccccgtcctaaccaaaatcgtcctcgtccccaaagaaataaccaaggttgtagcgatcgcaataatcctccgccacgtaatcgaggtggtcacggcggcagtggcgggaacaataatcgtcctccatctccctggctagatccagacaacgaacccactccagatcgatccgcctcttttgtagaatatttgcgctggatgcgtcctgcggatcataaatacaaagatgccacaaaaactcaaattctccagttagcgacggagaagactaattatgatccttacttgagaagccggaatcaacggataaaactgattgcgggtaatgccaatgtctttgaggtggtctgtccttggcgaattcgagtcgggggacaccgtggcccagagagtattcttttgccagcttttgatgcccaaggaatcccctatattccctcttccacattgcggggagtggcgagaacccaagcgatccgtgaggtaatggccaacaaaaactgtcactgggcagacgctgaaaaagattccctcatcgtccggcattttggagctctggatgcggaaggggcggataaagccggaaaaatcgtttttttggatgcctaccccgttgccgatcggtgccaggttgagatagacatggccaataatatctggagttgggcaggaaatgacctcaactattctcccaacccgaacccttttctctccctgaaggaaacaacttttctgattggtctcaggctcatctctggggaaaccaatcagcaactgcttcaacaggtcaagaattggctgattgcgggtctggcgaatggagctggttcccaggtaaacacgggctatgggcaactggtcaccaaagctttagcgaagtcagaccaggaatttctgagggtgaagtttgccttagaaggtcagcttatccatggttatcaaaaaccaggtcagtggcaatggaatgatcggcgtaatgagtggcaagcgcggggcagcaatcaagcggaagttagaccaactgcttttaagtcgatgttgcgttattggttccgggtgtttgctcttggggttatggctccgaagctggctcaagattgggaagggaaaatctttggggctatttctccaactcaatcccatggttatttgcgggtgaatatcatcgagggcaaagtgacccaaagagaagcacgatcctcccatcagggtagaaatgatccctgcggtgaaatggagggtatggtgactttttcttggtcgccggaagcgccccaaaatcgtgggtctgcagaaaaactggtgaaaaatttggcttggctgatgtttaatttgggtggcttaggtcagggagcaaggcggccttgttattccagaaaaaatagtgctagccagcgggctccttggtggcggggttcaacgttttatctggagtcagatccttggcacgatcccgaaaatctttcaccgaaggaatatgccagtttgtttaagcggcgactcagagatttttacacggctttaggagaggtgacccaggggcaagttatgcctgaacgactccaaacttgcggcatggtgaacgtttctacttggcaggaggcggctgatgtgaattgttgcattgtggtggcgaggggtgaagaagattttgggaaaccttttgctctggcgcaactgcatcaccaacgttttaaggtccagggtcgtaatggtttggactatgacggtaatctgtgcggccaggttggcggtcgcggtggggtaaagccttcaccagtctggattgcggatgtgggagatgattatcaggttgtcaccatttttggggcgacagctgcaccgcgacaggattatcttcaagcactccgagatgctggagcgatccaggtgtttccactaggagggaggggctag

SEQ ID NO: 401 - protein, 648 aa, Synechococcus sp
MVYNRPQPPRPRPNQNRPRPQRNNQGCSDRNNPPPRNRGGHGGSGGNNNRPPSPWLDPDNEPTPDRSASFVEYLRWMRPADHKYKDATKTQILQLATEKTNYDPYLRSRNQRIKLIAGNANVFEVVCPWRIRVGGHRGPESILLPAFDAQGIPYIPSSTLRGVARTQAIREVMANKNCHWADAEKDSLIVRHFGALDAEGADKAGKIVFLDAYPVADRCQVEIDMANNIWSWAGNDLNYSPNPNPFLSLKETTFLIGLRLISGETNQQLLQQVKNWLIAGLANGAGSQVNTGYGQLVTKALAKSDQEFLRVKFALEGQLIHGYQKPGQWQWNDRRNEWQARGSNQAEVRPTAFKSMLRYWFRVFALGVMAPKLAQDWEGKIFGAISPTQSHGYLRVNIIEGKVTQREARSSHQGRNDPCGEMEGMVTFSWSPEAPQNRGSAEKLVKNLAWLMFNLGGLGQGARRPCYSRKNSASQRAPWWRGSTFYLESDPWHDPENLSPKEYASLFKRRLRDFYTALGEVTQGQVMPERLQTCGMVNVSTWQEAADVNCCIVVARGEEDFGKPFALAQLHHQRFKVQGRNGLDYDGNLCGQVGGRGGVKPSPVWIADVGDDYQVVTIFGATAAPRQDYLQALRDAGAIQVFPLGGRG

SEQ ID NO: 402 - DNA, 396 bp, Synechococcus sp
atgcgaacttttgacccacgcaccctaaataaggaagcttttgaagcgctccaatctttacgcgatcgcccaaatcagagtgacgcccatctcaaggagcaaaaaaatcaggcgatggaactttacacctatctttctacttggggcatgatgcgccttaaggcagaggaaaaagccctcagtcaggaggggaaaaaacaagtggtgcaagcttttttccaacggctagagggtttgtctggagtaaaaaatctcgcaggcgatcgcggtttacaaaccttagtggccctttctgcagatgaatatttaggcttaacaggtctaggaatcgaactggccaatgagttcggtttttgggcaaatgccgtctatgcagacatcaaaggcgcacagtaa

SEQ ID NO: 403 - protein, 131 aa, Synechococcus sp
MRTFDPRTLNKEAFEALQSLRDRPNQSDAHLKEQKNQAMELYTYLSTWGMMRLKAEEKALSQEGKKQVVQAFFQRLEGLSGVKNLAGDRGLQTLVALSADEYLGLTGLGIELANEFGFWANAVYADIKGAQ

SEQ ID NO: 404 - DNA, 798 bp, Synechococcus sp
atgaatattcaatatctttatctcctcgctcccctccacactggcggcacaacccaagaagggaatctcctcggtattgcccgtgaatcccatactaactttccctatattccctctagtacgattcgtggacgattacgagccagttcacctccaacacaacgcgatcagctttttggtaatgagttaaatgatgggcaaacatccgatgggtctgacaacttaacccaaggtcaaatctggattggggatgggtctttactctggataccgattccttccctcagccatggggtgatttgggttagctgtccgttgctcctcaaccgctatgctcggttcagtggacatacaggggctgtgcaagagtattcttgcaatttcctcaaggccggtgaaaaaatctatctgaaggatgctatcttcaatccgcaagatttaactgattttggggcttggcaaaactttgtcccccaaagccatcagcaggaaattacccgggttctcgtacttccagatcaacactgcgccacggtcattcaaatgggactctggcgacaggtcaaaatcaaactcgatgaacacaaaacagtcgatggtggttttcgttatgaagaagcgattccccccgatagcctcatgtattttccctggggcatcacggcccagacccatagcaacgacgctgatcaggccagccaagagtttcgggatctactcacagacacagatcacgagctgttgcagatcggtggtcaggaaagtctcggacggggctttgttcagagttttcagtaa

SEQ ID NO: 405 - protein, 265 aa, Synechococcus sp
MNIQYLYLLAPLHTGGTTQEGNLLGIARESHTNFPYIPSSTIRGRLRASSPPTQRDQLFGNELNDGQTSDGSDNLTQGQIWIGDGSLLWIPIPSLSHGVIWVSCPLLLNRYARFSGHTGAVQEYSCNFLKAGEKIYLKDAIFNPQDLTDFGAWQNFVPQSHQQEITRVLVLPDQHCATVIQMGLWRQVKIKLDEHKTVDGGFRYEEAIPPDSLMYFPWGITAQTHSNDADQASQEFRDLLTDTDHELLQIGGQESLGRGFVQSFQ

SEQ ID NO: 406 - DNA, 1107 bp, Synechococcus sp
atgtattggtacaccctcactctcctcgatattctgctcctccgcgatgctaaaccctttactcctggtgaacgggcctgggctggtagcatcttcccacccaatggccatacccttgccggggcaatccgtagcctcttaccccaaggtcaaaaattaagtctgatcgggagtttattcagttacaaagaaacgctgtatttcccccgacccctcggttttgtgggtagtaaacccctctatcctctcagttggcattcggaacggagttccctaaacactcaaatgctctgggataaatcccaacccgctcccctgtctactctggagccgcctccatcagaaaacgaacagaaggaaacagaaaaacaatatcgttcttggctgcctgctactgtcatcgaaacttatttaaaaacgggaaacattaccgatgatgcttggttacgagatgaaactatcgagggggaaaaacaaccctgggaagtggagagtcgcccccataattctattgaatctggcacgcgtcaggtcaaggatgcggatggttatttcgtggaaaatggcattcgcttgaaaaagggctggagtttggcgatcgccctcgatgatacaacccataatcatttgcaaactctatctcaacctttaactgtgcgcctcggtggagaaggacatcgagtcattctccaacattcccctaaactcgatcaacaatggcaaaccatacacaatacttctgagcagaatttacagaaaaagggaaaggcgatcgcctatttgatcactcccggtatttttgagcgaccccaaggtaaacaatctgtttgtcgtccttacccctgggaatggaaactcagccataacgaagatggacagtttgtgagccttgccaccgaaaaagccatcccgattagtccccgcattcaactagagaaaaatggcaaaaaaagtagtattcccgccccccaagtttttgcctctccccccggcactctctattacctagaagaacctgaagaacccgatcacaagcgtacccaaaacaatcaagccctcggctattcccaccttctttgggtaaatgttccaacgatgcaagcttaa

SEQ ID NO: 407 - protein, 368 aa, Synechococcus sp
MYWYTLTLLDILLLRDAKPFTPGERAWAGSIFPPNGHTLAGAIRSLLPQGQKLSLIGSLFSYKETLYFPRPLGFVGSKPLYPLSWHSERSSLNTQMLWDKSQPAPLSTLEPPPSENEQKETEKQYRSWLPATVIETYLKTGNITDDAWLRDETIEGEKQPWEVESRPHNSIESGTRQVKDADGYFVENGIRLKKGWSLAIALDDTTHNHLQTLSQPLTVRLGGEGHRVILQHSPKLDQQWQTIHNTSEQNLQKKGKAIAYLITPGIFERPQGKQSVCRPYPWEWKLSHNEDGQFVSLATEKAIPISPRIQLEKNGKKSSIPAPQVFASPPGTLYYLEEPEEPDHKRTQNNQALGYSHLLWVNVPTMQA

SEQ ID NO: 408 - DNA, 2952 bp, Synechococcus sp
gtggcaggtaaagcatattggcaagcaaaaatttggggtctactccatgatcccgccctcaaagcactctatgggaatccggggcgtggcgaagaagggttatggaaaaagcttgcttgtatggaaggctgggcttctccgaaatcgagcgaggaaaaacaagcatctgagcttagtggcacatggttagatcatgtcggcttatgtgatctcatttcttcagccagcgatcgcggcattatccactacatcggcacagccgtagactacggtgcagaaggtctagagttatcgcacctcctatctggggagaaattgcccctccgactccaaaaccacgctgaaatccttgggcagagcagcagaaaaacttacctagaacagactgaagccgatctcattgatcaaatgcccgccgaaattcgtgacgatcctgaagctgcccaggcttgtttctggtggctatggcgctgtttaccccaagctgtcgctgatgaatttggcgcagcaagttttctaatgcccgccgaaactcgcttacctgacggttcgatctggagtcatgccagtatgactgctgccttagccggagccttagcgggatacgataccgagttagacgatatcccaaaaggtggtcaaaataccccgaaatctcacccttatctggcggtgtttacctttagtcccgtccaggaactcattaaagccagtcgtaaaatgaaggacttttgggcggggtcatggattttgcattatctttctgcgaaagtctgctggcgattggcccacaaatacggcgcagattgttttctctatcccagtctttatggacaaccgctaattgatcattggctattgcaaaaacattcagaatttgaggactggatccagccaccagatgaccgtcaactgctcactgccggatttcccaacgtcatcatgttggtgttaccggaagcccaagtagctgcagcaatgcaatcagcaaagaatttcttacttgatgcatggcgcgaaattgcgaaggaagtcctcgcagaattacaaggcgatcgccattggcaaacaaacctgagcgatacagatcccagttggaaaggctggctcgatgcccaatggcaaacctattggagtgcggtggcgatcggtgataaaaatagcagctttaagagtgttgggattcctacccagacttcagacaaaaaggctgatctcgaaaaatggatcgaacaacaaaataaagcctttaatggcaagcttttcacagatactgaacgggacttttttgagaaagcgacagcaaaatttaccgaacaacgcaaccgtaattatgcaggcagcttaaacgcaggctcatggtgggcagatatttgtgggcagactcgtctcgccctcaataccgttaaaaatgcccgtaactggaaactgccgaccgcttttggcacccgctctacgatctctggtttagggcctgtcgtccatccccaaggcaatggccaacatcgtgattggctcactgagggagaggcgcaacattattggcaacgggatgcaggcttgtttgatgggatcgagcaactcaacgccactgaaactgttaagcgcggtttagaaaaagttttacccaaactattggatcgagatccgaccgaattaaaggcttattatcctgatttaaccgtcggcgttgcgggttacctcaaaacccaaagtgagaaaaatggagaagctttaaatcaatatcaagatgcttgtcgtgcgattaggacaaaaattacggcagaccaccatgaaatcgcgaattttgtccggcaagagtggggcattccatggattgatgagactcatgatccgttatttgagaatttgccccatccaagactattaaatgcaggctggcttgtggaggagttagaaaacctcgataaggaagctcaaaaagtttatcgtcaggatctacagaacgaaattcagaaattctatccccaaaataatcccgccagttggtatgcgatcgccgctggagatggcgatgggatgagcgattggttgaagggaacaaagatggaagcctacaaagaatatttccccaaagctctcaatgttcctaatgatttaaaaaaaagctttgacaaatttagcgacgaagcaaaacggatgggccccgccacccacaatgccctaagccgtgccctcctcgacttttctaataaacttgccccctacctcactgaagaacgctatgccggacgcttgatttacagcggcggtgatgatgtcctggcttatacaaatctatgggaatgggatcagtggctttgggatatccgccaagcttttcgaggagataaagacgattgtggtgaatttaataatcaaggtcattactggcaagccgatcggtttgatcgccctctttttaccatgggcaagaatgcaactattagttttggtttagtcattgcccatcattctgttcccttggcgatcgccctcgaaaatctctgggaagcagaagaaggagctaaagatcatgaatatgaagatttcgccctagaaggtaaggagagaaagaaaaagaaagatgcggtgcagttgcgggtgatctatggcaatggcaatatcctcaaagcaacctgtaaattcgatactttccgagcgtggcaacaactcttagaaatcacaggtctggaagcttcaacctttgaaacggcggcaacccttttagaacagcatcctattccgacttcagtggcgatcgccccatgggtcagtgcttttgtggagcggcgtagcaaccttaacgaagaacaaaaaatcggcttgcaaaaatatttagctcactttttgcaagaactgtggaatacgaccaacgcagatgactgggataaagaatccaaaaactggctcaaagccgcagcctttaatcttcgtactcgcaaagtttaa

SEQ ID NO: 409 - protein, 983 aa, Synechococcus sp
MAGKAYWQAKIWGLLHDPALKALYGNPGRGEEGLWKKLACMEGWASPKSSEEKQASELSGTWLDHVGLCDLISSASDRGIIHYIGTAVDYGAEGLELSHLLSGEKLPLRLQNHAEILGQSSRKTYLEQTEADLIDQMPAEIRDDPEAAQACFWWLWRCLPQAVADEFGAASFLMPAETRLPDGSIWSHASMTAALAGALAGYDTELDDIPKGGQNTPKSHPYLAVFTFSPVQELIKASRKMKDFWAGSWILHYLSAKVCWRLAHKYGADCFLYPSLYGQPLIDHWLLQKHSEFEDWIQPPDDRQLLTAGFPNVIMLVLPEAQVAAAMQSAKNFLLDAWREIAKEVLAELQGDRHWQTNLSDTDPSWKGWLDAQWQTYWSAVAIGDKNSSFKSVGIPTQTSDKKADLEKWIEQQNKAFNGKLFTDTERDFFEKATAKFTEQRNRNYAGSLNAGSWWADICGQTRLALNTVKNARNWKLPTAFGTRSTISGLGPVVHPQGNGQHRDWLTEGEAQHYWQRDAGLFDGIEQLNATETVKRGLEKVLPKLLDRDPTELKAYYPDLTVGVAGYLKTQSEKNGEALNQYQDACRAIRTKITADHHEIANFVRQEWGIPWIDETHDPLFENLPHPRLLNAGWLVEELENLDKEAQKVYRQDLQNEIQKFYPQNNPASWYAIAAGDGDGMSDWLKGTKMEAYKEYFPKALNVPNDLKKSFDKFSDEAKRMGPATHNALSRALLDFSNKLAPYLTEERYAGRLIYSGGDDVLAYTNLWEWDQWLWDIRQAFRGDKDDCGEFNNQGHYWQADRFDRPLFTMGKNATISFGLVIAHHSVPLAIALENLWEAEEGAKDHEYEDFALEGKERKKKKDAVQLRVIYGNGNILKATCKFDTFRAWQQLLEITGLEASTFETAATLLEQHPIPTSVAIAPWVSAFVERRSNLNEEQKIGLQKYLAHFLQELWNTTNADDWDKESKNWLKAAAFNLRTRKV

SEQ ID NO: 410 - DNA, 36 bp, Synechocystis sp
gtctccactcgtaggagaaattaattgattggaaac

SEQ ID NO: 411 - DNA, 1731 bp, Synechocystis sp
gtggaatatctgcgctggatgcgtcctgctgaccatcaatataaggatgcgaccaaggtgcaaattctccaaaaagcaatggagaatgccaaaaattatgatgcccgtctaagtgtttgcaatcagcgaacaaaggcgatcgccaaagaaacctttgaagtaacttgtccatggcgcattcgagtggggggacacagggggccagaaagcattttgctaccagcgtttgatgcgttgggaatgccctatatcccttcggcaactttacggggagtggcccgaacccaggcgatccgtgaggtgatgcaaaacacaggcaaaaactggaaagatgcagaaaaagattccttgattgttaaacactttggggctttggatgcggataaagcagaccaagcgggcaaagttgtctttttggatgcctatcctacctctggcaagtgtttggccgtggatatggcgaacaatatctggagttgggaaggaaatcatcttgattattctcctaatcccaatccgttcctctcactgaaagagccaacatttttaattggactacgcctaatttctaactgttctgaccagcaagttttaacccaggttaaaaaatggctcattaatggcttagctaatggagctggttcccaaataaataccggctacggacagttgttggaaaatccaaaaaaactactaagtaaaccatttttagaggtagagtttgctttagaaggtcagctaattcacggttatcaaaaacctggggaatggagctggaataataacaaaaatgaatggcaaatgcgaggcagtaaccaagcagaagtgcgaccaacagcgtttaaatctatgttgcgttattggttccgtgtttttgcactgggagttatgcctcctaaaaatacaaaagttttagaggcaaaaatttttggaagtttggatcctcaatctatgggaattatcaaagttactgttcttgaaaaagagcccgaaaatgaaaacgaacagagtggaactttgcgtctattttttacttctgaagttgacgaaaaccaaaaagataaccttcagaatcttttcagtaacttaatatggctcatgttttatttaggaggaattggtcaaggggcaagacgcccttgttattaccgcaagggaaatcctaaaattcgtggttcatctttctttgtgcaaaatcctagtgaatttagtagtattcccgggaatattgatgaatttagattgaggatattgggaaaaattacccaattaattgatcttttaagcttactcaaaacaacattcaattttactgaaagaagtaataatttcaatcattctagccatcaatggacagaatgtgctgatctcaatatgcgcatttttgttgttcctaatgcaaatcaggacaatgctaagtcttacgctctcagcaagttaaatcaaaaatttcatcagttagatgatcaaattaaatctttgaagaaagagaaaaactttcctgaactaaaacgagtttattccgaactaaaaagtttatgtggaggtgtacaaaaagataaaatcttggttaatggacagcagaaagagagaaaagttttaccctctccaatatgggttcgtagcttgggtcctttcgatgtagttaccatctttggagcaacagcttccccccgttcagattatttacgttctctccagggggcaattcagatttttcctttgagctaa

SEQ ID NO: 412 - protein, 576 aa, Synechocystis sp
MEYLRWMRPADHQYKDATKVQILQKAMENAKNYDARLSVCNQRTKAIAKETFEVTCPWRIRVGGHRGPESILLPAFDALGMPYIPSATLRGVARTQAIREVMQNTGKNWKDAEKDSLIVKHFGALDADKADQAGKVVFLDAYPTSGKCLAVDMANNIWSWEGNHLDYSPNPNPFLSLKEPTFLIGLRLISNCSDQQVLTQVKKWLINGLANGAGSQINTGYGQLLENPKKLLSKPFLEVEFALEGQLIHGYQKPGEWSWNNNKNEWQMRGSNQAEVRPTAFKSMLRYWFRVFALGVMPPKNTKVLEAKIFGSLDPQSMGIIKVTVLEKEPENENEQSGTLRLFFTSEVDENQKDNLQNLFSNLIWLMFYLGGIGQGARRPCYYRKGNPKIRGSSFFVQNPSEFSSIPGNIDEFRLRILGKITQLIDLLSLLKTTFNFTERSNNFNHSSHQWTECADLNMRIFVVPNANQDNAKSYALSKLNQKFHQLDDQIKSLKKEKNFPELKRVYSELKSLCGGVQKDKILVNGQQKERKVLPSPIWVRSLGPFDVVTIFGATASPRSDYLRSLQGAIQIFPLS

SEQ ID NO: 413 - DNA, 396 bp, Synechocystis sp
atgccaaactttgacccccgtaccattaataaacaagcttttcaatctctccaggctctccgtcatcaagcaggtcaagataacgcccttttaaaagagcagaaaaatcaggcaatggaactttatacctatctttctacctggggcttaatgcggcttaaagcagaagaagttgccctaagtcagacaggcaaaaaacaggttgtccaacgcttttttaatgatttaggaaccctatctggccgtaataatttggctgattcccaagggttaaataccttagttgccctttccgccaatgagtatttaggactgacaggcttaggcattgaactggccaatgaatttggcttttgggccaatgcggtttatcacgacatcaccggtgcacagtaa

SEQ ID NO: 414 - protein, 131 aa, Synechocystis sp
MPNFDPRTINKQAFQSLQALRHQAGQDNALLKEQKNQAMELYTYLSTWGLMRLKAEEVALSQTGKKQVVQRFFNDLGTLSGRNNLADSQGLNTLVALSANEYLGLTGLGIELANEFGFWANAVYHDITGAQ

SEQ ID NO: 415 - DNA, 807 bp, Synechocystis sp
ttgactgttctcttattatcaatttccatgaacattcaacatctatatctcctctctcccctccacaccggcggcaccacccaggaaggtaatttattgggcattgcccgggagtcccacactaattttccctacattccttctagtactattcgggggcgtttacgggccgctgtggatgacaataaacgggatgctttatttggcaatgatctaaacagtgacaatgggaatttaacccagggcagtgtttgggttggggatggttccctgctttggcttcctgtgccttcccttagtcatggggtgatctggattagttgtcccctattgctcaatcgctatgccagggttgctaatgttgctgctcaaccggcgatcgtcccttatttgtgcaatttttatcaagctaacgaaaaggtttatttaaaggatgctatttttgaccattctgagttaaaccaatggtcccaggcggaagtaaaaaaattcattcctaatcaatccaatatgaccattgaaagagcattagtgttgccagatcagcattgtgcaacggtaatccaaatgggactttggcgacaggtcaagatcaagctagatcaacataaaactgttgatggtggctttcgctacgaagaagcaattccccctgatacattgatgtatttcccctggggtattaccgcccaagctaagggcaatcaggaggcgggcgaacagtttcaagacttattaactgtcaatgaaattatgcaaattgggggacaagaaagcttgggaaggggttttgttgagtgtttctaa

SEQ ID NO: 416 - protein, 268 aa, Synechocystis sp
MTVLLLSISMNIQHLYLLSPLHTGGTTQEGNLLGIARESHTNFPYIPSSTIRGRLRAAVDDNKRDALFGNDLNSDNGNLTQGSVWVGDGSLLWLPVPSLSHGVIWISCPLLLNRYARVANVAAQPAIVPYLCNFYQANEKVYLKDAIFDHSELNQWSQAEVKKFIPNQSNMTIERALVLPDQHCATVIQMGLWRQVKIKLDQHKTVDGGFRYEEAIPPDTLMYFPWGITAQAKGNQEAGEQFQDLLTVNEIMQIGGQESLGRGFVECF

SEQ ID NO: 417 - DNA, 381 bp, Synechocystis sp
atggatttagctgttagtaagattcaattaagcaatcctagtcaaaatcatttgcaagctttaactgtggaagcgttagccgattcagaaacagtacatttatgtattccagaccatattcaaatccaattgcagctagaaattgttgatcaaaaagaagttactttagccgatggtagccgtcgattaattccctatgtaggacctattaaaatcaaatttgagaaccgtatcggttttgccggagctttagtaatgggggatcaagttttactaggagctattcccatggaagatatggatttgattattattcccagtgagagacgattggctgttaatccccacagtcctaatattgccacttccatcgccaaataa

SEQ ID NO: 418 - protein, 126 aa, Synechocystis sp
MDLAVSKIQLSNPSQNHLQALTVEALADSETVHLCIPDHIQIQLQLEIVDQKEVTLADGSRRLIPYVGPIKIKFENRIGFAGALVMGDQVLLGAIPMEDMDLIIIPSERRLAVNPHSPNIATSIAK

SEQ ID NO: 419 - DNA, 1113 bp, Synechocystis sp
atgtattggtatagcctcactcccctcgatattctcctactccgggatgccaaacccttcacccctggcgatcgggcctgggctggcagtatttttccccccaatggtcataccttagcgggagcagtccggagtttgttgccccaaaatcaaaccatcagcctaatagggccattgttatatcacaaggaaaccctttattttcctcggccgttgggctttgtcggcaaaacccccctgttacctttgccttggcacgatgccaccagtcccttacgaagtcagatgttgtgggataaaacccagccggcccccttagcacccctggaaactgtttcccaaacggatataaaacgggacgaaaaacaggcccgtacctggttgcccttggatgtgatgatgggttacttgcaaactggggccattaaaccggaggattgggcccgaccggaggacgaagatagtcaaccctggaccatggaaagtcgcccccacaattccattgaagctggcacccgtcaggttaaggaaagtgatggttactttgtggaaaatggcattcgcttaaaggaaaattggtcgttggcgatcgccgttgacccgacaacccatcaacaattacagagtttgccccaacctctttccatgcgactggggggagaaggccatcgagttactctggtccatcggccagccctagaccaacaatggcaacgtctgcaaacattatccgaccagaactatcaacaacggcaaaaggcgatcgcctatttgatgactccaggcatttttgagcggggccgggatggggtttccacctgtcgtccctatccttgggagtggaaactaacccacaatcaaggttcctttatctccatggcgacggatcgggctgtggccattagcccccgcattcgggatcgtcagcgcaatccaggtcatagtatccctgccccccaggtgtttgccgccccaccaggcactgtttattacctgaaccaaccccagggtttatttgccgaccaagataatgctcccaaacatttacaacaaaccagaaaattaggttattcccatttgctttgggttaacttgcaggaggttaataggtga

SEQ ID NO: 420 - protein, 370 aa, Synechocystis sp
MYWYSLTPLDILLLRDAKPFTPGDRAWAGSIFPPNGHTLAGAVRSLLPQNQTISLIGPLLYHKETLYFPRPLGFVGKTPLLPLPWHDATSPLRSQMLWDKTQPAPLAPLETVSQTDIKRDEKQARTWLPLDVMMGYLQTGAIKPEDWARPEDEDSQPWTMESRPHNSIEAGTRQVKESDGYFVENGIRLKENWSLAIAVDPTTHQQLQSLPQPLSMRLGGEGHRVTLVHRPALDQQWQRLQTLSDQNYQQRQKAIAYLMTPGIFERGRDGVSTCRPYPWEWKLTHNQGSFISMATDRAVAISPRIRDRQRNPGHSIPAPQVFAAPPGTVYYLNQPQGLFADQDNAPKHLQQTRKLGYSHLLWVNLQEVNR

SEQ ID NO: 421 - DNA, 2940 bp, Synechocystis sp
gtgtctgaagtttactggcaagcaaaaatttgggggctactccacgaccccgccctcaaagctttacataacaactctggcagaggaggagagggagcttggcagtccttgggctgtatgcaaaactgggtgtcacccaaatccagcacagaaaaaaaagacggtgaactgagcaatagttggcttgaccatattggtttatccgatctaatcgcttccgccagcgatcggggagccattcactatattggtacgcccatagactatgacggcaaagggctcgaactttcccatctcctatccggggctaagttgccattaaaactagcaaatcatagcgaaattattggccaaggtaatcgccgtacttatttagagcaaaaagaattagaactgatccagcaaatgccagcggaatttctccatggtacagacaaagcccaggaatgcttttggtggttatggcgatgtttgcccgaagcagtggccgaacaatttggcccagagagcttgttaatgccagcggaaacccgtttgcccgatgcttccatttggagccatggcagtatgacagccgccttagccggagcattggcgggctatgacaccaacattgaagatattgccaaaggagcaagaaatacacccaaatcccaagcttatctggccgtattcacctttagccccattcaagaactaattaaagccagccgtaaaatcaaagacttttgggctgggtcttggatattgcactacctgtccgccaaagtttgttgggaattggcccagcagtatggccccgattgtttcctgtaccccagcctgtacggtcaacccttgatcgaccattggctactagaaaaatatggtgagcaaggctttagtcagtgggtaccccagccaggcgatcgccaactgttaacagcgggatttcccaacgtaattatgttggtactgcccaaagaaaaagttagcgccgccatgcaatcggccaaaaatcatctactaaacgcttggcgaaatattgcccatttagtctttgcagaattgcaacaacgacattggcaaaaacagttaaacccaactgatcccacctggaaacattggctggatgcccagtggcagacctattggagcgccatggcgatcggggcggagggaaaaaccctaaaaagtgtgggcattcccacccaaacaccggaaagtaaagcccaacgagaccaatgggttagggaacaaaatgaagcattttccgctagtttatttgcccaggaagaattggactttatcgaaaaatccacggatttgtttatccagcaacggaaccgcaactatgccggtagcttgaatgtgggttcctggtgggcagatatctttggccaaaccagatttacccttagtgcggttaaaaatgctcgcaactggaaaattcccaccgcctttggcccccggtccaccatttccggccttgggccagtggtccatccccaagcccctagtcaccaacgggattgggtcacagagggagatacacaaaaatattggcaacgacaggcagggttatttgatggcagtgaacagttaaatgccacggaaacagtgaagcggggtttggaaaaagtattgcctgcattactgggacggggggccaaggaattaaaaacctattacccagatcttacggtgggcatagcgggatatttaaaaacccaaccggatggtctaccgatttttgagcaggcctgctccgccatctcccaaaaaatccttggcgatcgccataaagtggccgattctgtcacccaagattggggaattccctgggtcgaagaaaacatggagaaaaaatatcatccccggctactaaattcgggttggttggtggaagaattggaagatctcgaccaaacagagttgcctagttatcgccaagcattgcaaacagaaatcgaaaaattttatccccagaataatcccactagttggtacgttttagctgctggggatggggatggcatgagcgaatggctcaagggcaccaaaatgagaacctacggcgattattttccccaggttttaactgtgccggaagacctacagccaacttttcaaccctttagcgaacagcctaaacggatgggccctgctacccataacgccctgagtcgagccctgctggatttctccaaccaattggtgccctacctcaccgaacaaagatatgcaggcagattaatttatagcggcggagacgatgtactggcctacaccaacctgtgggaatgggatcaatggttgtgggacattcgccaagcctttcgtggcgatcgcgatgaacacagggaatttgacagcacggggcattattggcactcaaaaactgcccacaaaaacttgccccaacggcccttgtttaccatgggggatggggccaccattagctttggcattaccattgcccaccactctgtccccctggcgatcgccttggagcatctttgggaagcggaagaggaagccaaagaacatgagtatggagaaggagaagataaaaaatccaaggatgcagtacaagtacgggttatttacggcaacggtaatgttttgaccgccaccagcaaatttgaagtatttaagacatggaaggatttactagatattgaaaccattgatgcttccacctacgaaaccgccgctacggttttagaacagcatcccattccggtgcgggaagcaattatgccctgggtaaatgttttggtagagcggcgtgatgccctcgacaaggatcaacaatcgactttgaggtctcgtttagcttgttttttaattcaactttggcagactactagccagaagaattgggaaaaggaagcaaaaaattggctcaaagtcgccgcatttatgaagcggaaccgttacattaaatttcccaattaa

SEQ ID NO: 422 - protein, 979 aa, Synechocystis sp
MSEVYWQAKIWGLLHDPALKALHNNSGRGGEGAWQSLGCMQNWVSPKSSTEKKDGELSNSWLDHIGLSDLIASASDRGAIHYIGTPIDYDGKGLELSHLLSGAKLPLKLANHSEIIGQGNRRTYLEQKELELIQQMPAEFLHGTDKAQECFWWLWRCLPEAVAEQFGPESLLMPAETRLPDASIWSHGSMTAALAGALAGYDTNIEDIAKGARNTPKSQAYLAVFTFSPIQELIKASRKIKDFWAGSWILHYLSAKVCWELAQQYGPDCFLYPSLYGQPLIDHWLLEKYGEQGFSQWVPQPGDRQLLTAGFPNVIMLVLPKEKVSAAMQSAKNHLLNAWRNIAHLVFAELQQRHWQKQLNPTDPTWKHWLDAQWQTYWSAMAIGAEGKTLKSVGIPTQTPESKAQRDQWVREQNEAFSASLFAQEELDFIEKSTDLFIQQRNRNYAGSLNVGSWWADIFGQTRFTLSAVKNARNWKIPTAFGPRSTISGLGPVVHPQAPSHQRDWVTEGDTQKYWQRQAGLFDGSEQLNATETVKRGLEKVLPALLGRGAKELKTYYPDLTVGIAGYLKTQPDGLPIFEQACSAISQKILGDRHKVADSVTQDWGIPWVEENMEKKYHPRLLNSGWLVEELEDLDQTELPSYRQALQTEIEKFYPQNNPTSWYVLAAGDGDGMSEWLKGTKMRTYGDYFPQVLTVPEDLQPTFQPFSEQPKRMGPATHNALSRALLDFSNQLVPYLTEQRYAGRLIYSGGDDVLAYTNLWEWDQWLWDIRQAFRGDRDEHREFDSTGHYWHSKTAHKNLPQRPLFTMGDGATISFGITIAHHSVPLAIALEHLWEAEEEAKEHEYGEGEDKKSKDAVQVRVIYGNGNVLTATSKFEVFKTWKDLLDIETIDASTYETAATVLEQHPIPVREAIMPWVNVLVERRDALDKDQQSTLRSRLACFLIQLWQTTSQKNWEKEAKNWLKVAAFMKRNRYIKFPN

SEQ ID NO: 423 - DNA, 369 bp, Synechocystis sp
gtgtttaaaaaacttcatactatttttgtggttgggggagttaaaatttcggcaactttcctcactgtggcccgtagcatgtattccccttcccgacttctctttgcccgcaatcttgtcttggccattgccaatggtctgatcactttggtgattttgcttattgcccctttgggtttggcggcggtgattatcaataccctgttggtggcctgttcgactttcatgctcagtgtttttggtgatgttgtggtgcggtggttgctccaggggactaatccccatggtctacccactaatgctaatccaaatgtcggtattactcctcaaacttcccatcaacctacccaaaggccggaccgctggtga

SEQ ID NO: 424 - protein, 122 aa, Synechocystis sp
MFKKLHTIFVVGGVKISATFLTVARSMYSPSRLLFARNLVLAIANGLITLVILLIAPLGLAAVIINTLLVACSTFMLSVFGDVVVRWLLQGTNPHGLPTNANPNVGITPQTSHQPTQRPDRW

SEQ ID NO: 425 - DNA, 990 bp, Synechocystis sp
gtgaaaactctctatgtttcccaatctgactgttatgtttccctaagaaaggagtttctgttggtgaagcgtcaggatcggattttggcggaggtgcaactgccttttttggaacaggtattgatttttggcaaggcccaggtcactacccaggcgatccacgcttgcctgagtcgcaatattcctattctgtatctttcccgcatgggtttttgctacggccggattattgccattgaacggggttatcgtcatctgagccgatatcagcaggagcttggctggcaacaacggttaattaccgcccgtaccattgtggcggcgaaaataaaaaatgctcgagtttttctccaacgccaacaccgcaagcaccccaccccttctcttcagttggcgatcgatgggctaaagcactttgtggagttaacagtgaaagctgacaagttagaacaactgttgggctatgaaggcactgcggctaatctttattttcaagcttgggcggattgcatcgaaaattctaactttatcttttttggtcgttcccgtcgtccccctggtaatccggttaatgccatgcttagttttggctatcaggtgctttggaatcatttactaactttgattgaattgcaggggttagacccctatcaagcttgtttacatcaaggttcagaacgtcatgcggccttggcttcggatctaattgaggagtttcgagtccctatagtggattctttggttttgtatatgataaatcgtcgtttgatcgatgtaggggaggattttgtcttccaaaatggtggttgttttctcaatagctccggtagaagaaaatggctgggggcttttgtgggcagaatggaggaatttttgtcctttgaccagggtgattttccccgctggcattgtctaatcgatcaagtaaaaaaatataaggcttttatttattctccttctaatagttattctccttttttaattcgctaa

SEQ ID NO: 426 - protein, 329 aa, Synechocystis sp
MKTLYVSQSDCYVSLRKEFLLVKRQDRILAEVQLPFLEQVLIFGKAQVTTQAIHACLSRNIPILYLSRMGFCYGRIIAIERGYRHLSRYQQELGWQQRLITARTIVAAKIKNARVFLQRQHRKHPTPSLQLAIDGLKHFVELTVKADKLEQLLGYEGTAANLYFQAWADCIENSNFIFFGRSRRPPGNPVNAMLSFGYQVLWNHLLTLIELQGLDPYQACLHQGSERHAALASDLIEEFRVPIVDSLVLYMINRRLIDVGEDFVFQNGGCFLNSSGRRKWLGAFVGRMEEFLSFDQGDFPRWHCLIDQVKKYKAFIYSPSNSYSPFLIR

SEQ ID NO: 427 - DNA, 279 bp, Synechocystis sp
atgtttctctatgttattgcctacgatattcctgatgatcgccgtcgtaaaaagatggccgatttattagaaggttatggccaaagggtgcaatattctgtatttgaatgtacattgtctaagtctaagtttaatgaattgcaaaaacgtctccgcaaaatttatcaatcagaggaagatagtttgcgtttttatcctttgtctgggcataccctcacccaggttgatatttggggggaaccaccactcactaagccccctggctcagtcattgtctaa

SEQ ID NO: 428 - protein, 92 aa, Synechocystis sp
MFLYVIAYDIPDDRRRKKMADLLEGYGQRVQYSVFECTLSKSKFNELQKRLRKIYQSEEDSLRFYPLSGHTLTQVDIWGEPPLTKPPGSVIV

SEQ ID NO: 429 - DNA, 35 bp, Syntrophus aciditrophicus
gacagaattgacctgatttacgaagggattgcgac

SEQ ID NO: 430 - DNA, 1005 bp, Syntrophus aciditrophicus
gtgcataaattcacggtcatggaacagcctattcatattccggtgagcagatgcatgttgtacggcagatattcattttttaataattttctggatgatgcggtccttccttgttataagggatcaaccttccgtggagttttcggtcatgcccttaagaaggtaacttgcgcactgaagcgacaggaatgtacaggctgccttctgcaggaaaagtgtgtttatgccttcattttcgagattcagcctgacgcagataccgtaaaacgccgccgcatcgctgccccacctcatccttatgtcattgaaccacccattgaaacccgcaaccgatacttacaaggaaaatctttcaattttgacttaattctcttcggccccgcaaatgattacctgccttattttgtttatgccattgaacagatggggcagttagggatcggtcagagaatgggggggcaacgcgcccgttttcttcttcaatctgttcgtgttgcaaactccaccgtatatgacagtcataatggcaaacttaacagcggctgttttacggaagatctcgcacttttcgatgttttaatctccgataaccctgatcactgcacagagcttgaactgaccctgttgactcccctccgtctcaaatatgaaaataagtttgaagccacgctcccttttcatgtcctcatccgcgcagctctccgtcgaacttcatctctttgccattactatggggcaggcgaaccatcgctgaattaccgaggacttgtacggcgagcccaaacaattactgtcaaagaatctaacctccactggtttgattggaaacgatactcaaaccggcaggatcaggccatgctcatgggaggattgaccggaagcatccgctacgcaggttccctctccgaatttctcccccttctccgtttctgcgaaaagacgcatctgggcaagcagacatccttcggactgggtaaaatcgacattaaagaggttgcaccttga

SEQ ID NO: 431 - protein, 334 aa, Syntrophus aciditrophicus
MHKFTVMEQPIHIPVSRCMLYGRYSFFNNFLDDAVLPCYKGSTFRGVFGHALKKVTCALKRQECTGCLLQEKCVYAFIFEIQPDADTVKRRRIAAPPHPYVIEPPIETRNRYLQGKSFNFDLILFGPANDYLPYFVYAIEQMGQLGIGQRMGGQRARFLLQSVRVANSTVYDSHNGKLNSGCFTEDLALFDVLISDNPDHCTELELTLLTPLRLKYENKFEATLPFHVLIRAALRRTSSLCHYYGAGEPSLNYRGLVRRAQTITVKESNLHWFDWKRYSNRQDQAMLMGGLTGSIRYAGSLSEFLPLLRFCEKTHLGKQTSFGLGKIDIKEVAP

SEQ ID NO: 432 - DNA, 1134 bp, Syntrophus aciditrophicus
ttgaaaaatatcctccttgccgttacaggtctctcccctcaggtcctcacagaaacactttacgcgctgcaccaacaaggacagattgttcagtccattcaagtcatcactacgcggcaaggaaaggagaagatcaacgcctacttgttgtcacctactgatggccagtattacagttatttgaaggattatggcatcaacccgtcatcgatttccttctgtgcagaaaacattcatgtcattaaagacagaaacggaatcgaaatcgatgatatcgcgggtgaggatgacaatgaacgcctcttggagctttgtctatccctgactttccaattcacaagcgattcacaaaatacggttttcttttccattgcaggtggacgcaaaaccatgagtgcctgcttgatgactgcggcacacctttatggacgacctcatgatagggtgtatcatgtccttgtgtctccggaatttgagagcaatagagatttcttctacccaccccgtgagtccgtttctatcgaactgatggacagaaatggtgagcaatatgtcaaggagacccgattcgctcggatcactctgacttcggttccctttatttccgttcgcaaccgaattgaagatgatctcctaaaggagcctcaagatccgcccactttgatgctctccctcattcgagaagaaccaccttccctgaccatcgatctcataacttgtaaactgatatttaaggggcgcgagttggatatgcccccaactcgtctggctctctacgcgttttttgccagcatcaaaaaagattgcctacgtaccgacactaattgtcggcactgtgcggactgttaccttaatagcatagccattgaacaacgtaacaatgaaatcgcagaattgtacaaaaggattgccttttcccgtgatttccacgccatgcgggaagcaagtgatggcggcattctgaatctcgatgaagccaacttcaagtcctatcgaagccgcatccggagggatctggaaaggggcttcgggctctccgccagccggatgctggagatcgcctcgacgggaaagcgtccggacacccgctacggaattccttttgaacgggaaagaattcgcatgatcttctga

SEQ ID NO: 433 - protein, 377 aa, Syntrophus aciditrophicus
MKNILLAVTGLSPQVLTETLYALHQQGQIVQSIQVITTRQGKEKINAYLLSPTDGQYYSYLKDYGINPSSISFCAENIHVIKDRNGIEIDDIAGEDDNERLLELCLSLTFQFTSDSQNTVFFSIAGGRKTMSACLMTAAHLYGRPHDRVYHVLVSPEFESNRDFFYPPRESVSIELMDRNGEQYVKETRFARITLTSVPFISVRNRIEDDLLKEPQDPPTLMLSLIREEPPSLTIDLITCKLIFKGRELDMPPTRLALYAFFASIKKDCLRTDTNCRHCADCYLNSIAIEQRNNEIAELYKRIAFSRDFHAMREASDGGILNLDEANFKSYRSRIRRDLERGFGLSASRMLEIASTGKRPDTRYGIPFERERIRMIF

SEQ ID NO: 434 - DNA, 870 bp, Syntrophus aciditrophicus
atgtttaatatctctcgattcaaggatattgaaagctatgattacaaattcgaggtagtaacaccgctttttcttggaggtgctgatccacaaaatgcagaaatacgatctgcaccgattaagggtgctctcagattctggtggagggcactttatggcagtgatgatatagaagaaatgaaaacaaaagaaaatgaaatttggggctccactcaatctaaatcacaggttacgatcaaagtaatatttcaggacattcagacatcaagagaaaaattggataagggaaattttaatatttacgaatatcttggctacggttatcgcgtcagcaataacgtgcgaagctattttaaaagtggatctttcacaattcggcttacatacaataaaaatcaccacgatcagatagcaaatactatttcgtttttgatttatttcggcggtattggtgcaaaggcgagaaatggattcggttccttatactgctcagatgttcagaaacccttatttgtacaattcaaaaaaggacgtatcaaatcatttaccgcactctctgagcaatcattactattcgataatttcactccaaaagaatcatggaaagatgctcttgccgaaattggcaatctttataagcaagcaaggttcgaacttaaaaatcaaggagaaaaaagagagttactggcaaaaccattcaagcgagacaactcaaggcatgcaaaaccatatttccttcacgttacaaaactgcctagcggccaatataaagctcacattctttatctgccctatgagtactacgatgaaaagaaacgacaagattactttaggttatgtaataaagtgaacgagatactaaaaaaataa

SEQ ID NO: 435 - protein, 289 aa, Syntrophus aciditrophicus
MFNISRFKDIESYDYKFEVVTPLFLGGADPQNAEIRSAPIKGALRFWWRALYGSDDIEEMKTKENEIWGSTQSKSQVTIKVIFQDIQTSREKLDKGNFNIYEYLGYGYRVSNNVRSYFKSGSFTIRLTYNKNHHDQIANTISFLIYFGGIGAKARNGFGSLYCSDVQKPLFVQFKKGRIKSFTALSEQSLLFDNFTPKESWKDALAEIGNLYKQARFELKNQGEKRELLAKPFKRDNSRHAKPYFLHVTKLPSGQYKAHILYLPYEYYDEKKRQDYFRLCNKVNEILKK

SEQ ID NO: 436 - DNA, 2709 bp, Syntrophus aciditrophicus
atgacatggcagatacctgatacatcctactgggaaaacaagtttgccgcctactggcatgaccctatcgataaagtcatcagcattcaaaaccacgaagaaagggctgctgattatttgcagatattcggaatcgacagaccgaacgatgaattctggcaaatggctgatgccatcgctgccggttttgagcgggggcaggttccctcacatagtactgacgatactaaaaatggggctgtagactttgctgagtcaccggttattacgcatccgactaccgggaaaaaaggtttgctgaagattacaggtgtgaagatgcatattaatgaccttcatgccgccatcatggaatttctgggaaaacatattggaaaagaagcaggaaatggcgattatgcagattgttttaagggtgattacgcacgatttgccgttgcccggtttctctatacccatctcgttttgcgttttatccttgctgaaaagaacatcggcggacttggcgcactttggcaccgcatccctgctgattcccggtttcccgaccattccatctggcagcacaacgcgctgtgttccgccatcagttcctgtgttgaacttggcggtagagcagaagaagtcagtctcatggtattttccattacaccggttcaaggatttatcgctcgtgccagaaagatgcgcgattattggacaggttctgttctcttgtcctggctggcctttgaagggcttcgctgggtgatggagaatttgggggcagaccatatcctgtatccttccttgatagaccaaccacttgtaaacaattatctggaaaaagaatggaatgtctcaggtccattcaaacctgaaatttggaataatcagcccaatgaaatcgccagcctgccgaataaatttctattccttattcctttcggcaaagcggatgaaatagctgcagagttggaaaaagccatttcggaaaaatgggctgcagttgccgacaaggtagccgcttatctgattgacaggataagcatgggcaatgatggcagagaacatatccaagagatgtttaaacgtcagacttccggattctgggatttccagtgggctgcgacccgccttgccgattatacggacaaaaaagaattggaatctctactcgacgaaacccagtggaaagatcaatttgcttacatggaagcaattcaaccaattttaaataaaaaaggatattcttcagaaaataccagcagaggaattctttattccacaagccacagtctggtgcaatcggcccttgccgcagagaagtcgataagatcggtagcgcggacagaagaaccgggagaaaaatgccagatgtgcagcgaattcgaggttttgcattccaagcaatggaatggtgaagttgcaggccattatgccgaccatcttaaggaattttggagccagcttaatccagagcaaaaggacgatgttgattttaaagagaatgaacggctttgttccgtttgtttaatcaaacgtcttgccccgcatattttgaaaaattcaaatgaccatattctttgtaacgttttccgttccatcgacaacgttccttcaacaacggaaatggcgcttcataactattttcaaagatttggcattaccgataaaaaagaccaaagggttattgctcagaaactccacaaagatgaagagcatgtcaggggcgaaaagatcgataacagagacaaatactacgctcttctcatgatggatggagacaatatggggaaactgatcaacggggaaacgattgcctcatgctggaagaagattatgcatccccaaattgctgaacgattaacgggagtcgacttttatcctttgtatcgagacgtctggcagaagatttacggcaatgccgggttgaataaaagattggttacaccggcaattcacgcggccatatcggaagctttgggcgatttctccatctatggcgtcgcgtccatcataaaggatcatgatggacgcttgatctacgcgggcggcgacgatgtctacgcatttctccctatcggctctgcactgccggcggcacgtaaaatcagagattactacacatccatatttcgctatgtaagtatggatcgcacatctaagccgattacagagaaagaatggatgcccgaacgaggaaagctttccgtaaatctcggcatcggcaatgaaatatccatatccgccgccattctaatttgtcaccacaaggaaagccttacccaaatgattgaacgggcacatcaattattacaatcgcaagcaaaggataaggctgaacgtaatgcatgcgcgattgaactgcgaaaacgtcacggcggctcccgttatttcacaaggaagtgggcagataaagaaacctgggacgctttcgaattcattgggaagatgacggaagagaatcatcgccaagtttcccgctcccttttgtatcgtctcgaaaccctacggcccggcatcgaagcaattatgatacaagacacgaaggcggaggaaaatctgaacgcgttcatagcaaaacaaatcgaacgatcgggtactgaatcattggaaaataaagaactcatagcccgttcgatcgcctacatcgtatgggacaagaacaatcataaaaaccctttcaatccagagggattgatgattgccgactttcttggaggttag

SEQ ID NO: 437 - protein, 902 aa, Syntrophus aciditrophicus
MTWQIPDTSYWENKFAAYWHDPIDKVISIQNHEERAADYLQIFGIDRPNDEFWQMADAIAAGFERGQVPSHSTDDTKNGAVDFAESPVITHPTTGKKGLLKITGVKMHINDLHAAIMEFLGKHIGKEAGNGDYADCFKGDYARFAVARFLYTHLVLRFILAEKNIGGLGALWHRIPADSRFPDHSIWQHNALCSAISSCVELGGRAEEVSLMVFSITPVQGFIARARKMRDYWTGSVLLSWLAFEGLRWVMENLGADHILYPSLIDQPLVNNYLEKEWNVSGPFKPEIWNNQPNEIASLPNKFLFLIPFGKADEIAAELEKAISEKWAAVADKVAAYLIDRISMGNDGREHIQEMFKRQTSGFWDFQWAATRLADYTDKKELESLLDETQWKDQFAYMEAIQPILNKKGYSSENTSRGILYSTSHSLVQSALAAEKSIRSVARTEEPGEKCQMCSEFEVLHSKQWNGEVAGHYADHLKEFWSQLNPEQKDDVDFKENERLCSVCLIKRLAPHILKNSNDHILCNVFRSIDNVPSTTEMALHNYFQRFGITDKKDQRVIAQKLHKDEEHVRGEKIDNRDKYYALLMMDGDNMGKLINGETIASCWKKIMHPQIAERLTGVDFYPLYRDVWQKIYGNAGLNKRLVTPAIHAAISEALGDFSIYGVASIIKDHDGRLIYAGGDDVYAFLPIGSALPAARKIRDYYTSIFRYVSMDRTSKPITEKEWMPERGKLSVNLGIGNEISISAAILICHHKESLTQMIERAHQLLQSQAKDKAERNACAIELRKRHGGSRYFTRKWADKETWDAFEFIGKMTEENHRQVSRSLLYRLETLRPGIEAIMIQDTKAEENLNAFIAKQIERSGTESLENKELIARSIAYIVWDKNNHKNPFNPEGLMIADFLGG

SEQ ID NO: 438 - DNA, 984 bp, Syntrophus aciditrophicus
ttgccgactttcttggaggttaggaaggaaatgactgattggtacagtttcaagccacaagacacgttatatttccgcggtgcggaaccggcaaacatgggtgaaagtcatgcggcatccatgatttttcctccacccgcccataccattgccggtgctttgcggactgctacaatcattcaaaatgatgtagcctttgaagattataaaaaaggtttgtgttcgcaagaggttactgatgcaatcggcaaatcaggagaagacagccctttcagcattcttggtcccttctttcaataccaagaaaagacatggattccctgcccgtttctttggttttctgaaaagaaaaagaccgcagaagactcacagtcaagactacgtaagatcatggtcagcgcccctcttcacaacaacattatggtgaaaacggccagcgggaaaaatctcttatgggttaaggggaaaaaccttgaaaatctcggaaaccaatgggttagtgctgatgaattatgcaaggaagcagaagagaaaacgattagagaaagcaaagatttcttcgtaagcgaaacccatactggaatagcccttgacgtgaaggttaaacggcgcacggcgagagaggggcatctctattcatttgtccatgcccgcttacatcaggatgttgaattgatctttggggttacgcggagactgccgataaatgattccggcgtcctcaagcttggggctgaacagagatttggtgaatacaaaaaaataaatgatattcatttatcaaaaggaacaacaaattttttcatgacattgtccattttggagggcaatagagaaactaatcggcattgcattgccacaggtcgtattcgctatcttggaggttgggatctgcacaaagggtttcacaaaccgatgaggggatactttcccgcaggaaccgtatttgacaaaaaaatcaatgaatcatgtatccaattatag

SEQ ID NO: 439 - protein, 327 aa, Syntrophus aciditrophicus
MPTFLEVRKEMTDWYSFKPQDTLYFRGAEPANMGESHAASMIFPPPAHTIAGALRTATIIQNDVAFEDYKKGLCSQEVTDAIGKSGEDSPFSILGPFFQYQEKTWIPCPFLWFSEKKKTAEDSQSRLRKIMVSAPLHNNIMVKTASGKNLLWVKGKNLENLGNQWVSADELCKEAEEKTIRESKDFFVSETHTGIALDVKVKRRTAREGHLYSFVHARLHQDVELIFGVTRRLPINDSGVLKLGAEQRFGEYKKINDIHLSKGTTNFFMTLSILEGNRETNRHCIATGRIRYLGGWDLHKGFHKPMRGYFPAGTVFDKKINESCIQL

SEQ ID NO: 440 - DNA, 951 bp, Syntrophus aciditrophicus
ttgacaaaaaaatcaatgaatcatgtatccaattataggagaaacgccatgctgaaaagaggtcttttttccatctgtacattttatgccgtatcgcccatccatgccggcagcgggtcatcgttcgccgccgttgatttgcctatccagcgtgaacgacacaccaactggccccatatccaggcatcaggagttaaaggagccatgcgggcgcactaccgagatttcgctgaagataaatcgttgatcaatttccttttcggatatgacaaagacgatgatgattatcataagtcctataattccaagcggcaggaaaacgaacgatttgaggtgaaggacaattttcccggcgccatttccttctccgacgccaaattgttggcctttcccgtccggtcaaatatagcaccttttgtctgggtcacctgtcccgcagttttaaaaagattaagtgacgatctttcatttacaggattgggatcaattgatgacatacagaacatcgatggtgaaaatgccctatgccttgcaggtaacatttcggataaagtgattctggaagacatgttcgttaatgttgtaaacgtaagcacttcaaatcccatcccccaaggtttccctactttagataggctactgctggtctccaatgagacatataaatatgctgtcgagtcttgtacggagattcaaacgcagataaaaattgattctgagaaaggaacggcccaagacggttcactacgctaccaggaattacttcctgcggattctgtgctctacactgtcgtttattacagccgcgctgtttttgataatgcgttacaggccgaaacagtatgtagccatgtccaggatatcatcacaaaattcattcagataggtggcgacgaaacgctgggtcgtggcatctgcaagcttaattggatttccggaggtggcaaatga

SEQ ID NO: 441 - protein, 316 aa, Syntrophus aciditrophicus
MTKKSMNHVSNYRRNAMLKRGLFSICTFYAVSPIHAGSGSSFAAVDLPIQRERHTNWPHIQASGVKGAMRAHYRDFAEDKSLINFLFGYDKDDDDYHKSYNSKRQENERFEVKDNFPGAISFSDAKLLAFPVRSNIAPFVWVTCPAVLKRLSDDLSFTGLGSIDDIQNIDGENALCLAGNISDKVILEDMFVNVVNVSTSNPIPQGFPTLDRLLLVSNETYKYAVESCTEIQTQIKIDSEKGTAQDGSLRYQELLPADSVLYTVVYYSRAVFDNALQAETVCSHVQDIITKFIQIGGDETLGRGICKLNWISGGGK

SEQ ID NO: 442 - DNA, 396 bp, Syntrophus aciditrophicus
atgagaacgatggcgcagaaacgggcggaatatgcacttgaaaaggtgcttgccgttgagaataaaagggactttcaatcattttctgctggtgctccggctacgatccttcagaacgggttcggacaaacgctcgccttttggttagcaaaaggaacaaaaaacgggaaaattgaaattacggataaacatattgtgttgttcgatatggtgacagaatggctatccttcaagagaaaagacgttaataatgaattcattaaagttgttaaagacagacctacaataataaaggaattaacgaccatggatcaaagacagtatctatctgcccaaagtgaaactttatccctgctcgaatggatcaagcgatttgccaatgccgatttgacataa

SEQ ID NO: 443 - protein, 131 aa, Syntrophus aciditrophicus
MRTMAQKRAEYALEKVLAVENKRDFQSFSAGAPATILQNGFGQTLAFWLAKGTKNGKIEITDKHIVLFDMVTEWLSFKRKDVNNEFIKVVKDRPTIIKELTTMDQRQYLSAQSETLSLLEWIKRFANADLT

SEQ ID NO: 444 - DNA, 1392 bp, Syntrophus aciditrophicus
atggcattctaccctgttcataaggaattacagaatatttcccagagcatgccgcaaggaaacttcggcctctggtataacaaattcatcccgctcagtgatgatgcattcaagccgtccgatgataaaggttctaatggcaaaggagatgaaaacaggcctgtggattattatttcggacaatacagcaagctgagactcaatgctgcggaaacggctgcaatacttaagcagaagcatgaagacatggatgatttttgcgcaaacttcccgccgcaaaaatatgaggaaatcgccatttgtgcgactcttgattctcccttgatcacaggcatcggcgaatcgcacccccacgaggtcagcatggtcttcgatcacaatatgggcatcccctatataccggcatcaggcgtgaaaggaattgtccgctttgcccatacgatttctttaatccctgaagcaatgaataaggctgaagttattgataacgtccggtttgatgatgaagcagattggacatctgttccgcacatgttcggcacccaaaaaaatcgcggaaatgtgattttccttgatgcctatccggaggatatccccgccctgcacatggacatcatgaatccacactattcaccctattatagcgaaggcaaacctccagccgaccaccacaatccaacacccataaagtttcttaccgttgccaagggaactaaatttattttcagggctgttgcaaagaaagaacagaatcttcctcaaaaaattagagtcgcatttgcagaagcccttacgaaggaaggcgtgggcgcaaagatcgccctcggctatggccgtttcgtaatcgatgaagatggtcagaaagttcttttgaaaaagcgcaaacaaaggcatgaagaaaagaaaagacgtctttctccttggctcgactatattgagctaatcaatcaagttggcgactggggacaatttaaacaaatcgttcttgataatgagaagctcgttgaataccggaaagaaatggatgtgactgaagccgtcaggattaaagcgctggagatccggaataaatggcgtaaaagttggggtgcttcgcgtgacgaacaaatagcgacatggttgcaaccagccggagttgaatggccctgcattgtagcaggaatcgaaaacccggttaaagaaaagtcagcggattatgaaaaaattatgcaactaattgattggggtgcatacaaatcagccggtatcgacctttcaaaattacccttagatgcccttcaacttctcaaacaaaaaatggaagaatggggatgttattctaaaaaggcaaaagaagataaaaaaacagccttcaagaaagtaaaggatctattgagacagcatcaaaaataa

SEQ ID NO: 445 - protein, 463 aa, Syntrophus aciditrophicus
MAFYPVHKELQNISQSMPQGNFGLWYNKFIPLSDDAFKPSDDKGSNGKGDENRPVDYYFGQYSKLRLNAAETAAILKQKHEDMDDFCANFPPQKYEEIAICATLDSPLITGIGESHPHEVSMVFDHNMGIPYIPASGVKGIVRFAHTISLIPEAMNKAEVIDNVRFDDEADWTSVPHMFGTQKNRGNVIFLDAYPEDIPALHMDIMNPHYSPYYSEGKPPADHHNPTPIKFLTVAKGTKFIFRAVAKKEQNLPQKIRVAFAEALTKEGVGAKIALGYGRFVIDEDGQKVLLKKRKQRHEEKKRRLSPWLDYIELINQVGDWGQFKQIVLDNEKLVEYRKEMDVTEAVRIKALEIRNKWRKSWGASRDEQIATWLQPAGVEWPCIVAGIENPVKEKSADYEKIMQLIDWGAYKSAGIDLSKLPLDALQLLKQKMEEWGCYSKKAKEDKKTAFKKVKDLLRQHQK

SEQ ID NO: 446 - DNA, 1113 bp, Syntrophus aciditrophicus
atgcgtgacacgctgatctgcaccgtaggcaccagcctcaaaaacaacatcgccggtcaacaggaatcgcctctatatccacttcttgcggcacataatgccaaaggcgtggttctggagcttttgaaacgttctccgcaggatcggcttaatggcgcggagatcaattccattcacagcattatcgtgggcaagcatcttaatctatgtgaaaatcttgttttcctggtctccgacactcccgacggcttcctgaccggacaaatcctgaatcattactatacaaatccaagaaatgctgatcgtttcaccactgtgtcagtaaaaaccatcgaaggactcacggaccaggacgtgaaacgctttcggaacgaaggaatgcggaatctcgtccgcctcatcggacaggaggcccgagtccttggatcgaatcgtttactcattaacgcaacagggggatataaggcacagatttccttcgcaggcatgatcggccaagctctggaaatccccgtctgctatctttttgagcgtttttccgaagtaatccaattaccgccccagcccgttgctcttgacctttctttctggcttgaacacgtggatattttttttgatctcgaggaaggaatcgaatctgatcaacccttttcatcgccggatgagcggttcgcgacgatagtggacgatacgaacgtcgataaccgctggcttacctttctttctcctaccggccaactctatcacgaaaccttccgctatcattttgcccacagtgctaaatctcttctgccgcccgattcaggtcttcccctggagaaaaagaaaatccgttatgaggacgacaataaaggaaagcacaaaggattacgtaacttccttgataaacttaaaaattatccttatgtgaaagagatctatacttattattataacccgaacctcaatgaacctgtccgatttcgcaaatcggccaagggtaaaaccggacagattgaaggaatatacagcaacgttggggcaacaacaaagttcgatctcatcaccactgctcagaacagcagacaacttcaggcctgcatcgccgatttgaacgacggcctgacatcataa

SEQ ID NO: 447 - protein, 370 aa, Syntrophus aciditrophicus
MRDTLICTVGTSLKNNIAGQQESPLYPLLAAHNAKGVVLELLKRSPQDRLNGAEINSIHSIIVGKHLNLCENLVFLVSDTPDGFLTGQILNHYYTNPRNADRFTTVSVKTIEGLTDQDVKRFRNEGMRNLVRLIGQEARVLGSNRLLINATGGYKAQISFAGMIGQALEIPVCYLFERFSEVIQLPPQPVALDLSFWLEHVDIFFDLEEGIESDQPFSSPDERFATIVDDTNVDNRWLTFLSPTGQLYHETFRYHFAHSAKSLLPPDSGLPLEKKKIRYEDDNKGKHKGLRNFLDKLKNYPYVKEIYTYYYNPNLNEPVRFRKSAKGKTGQIEGIYSNVGATTKFDLITTAQNSRQLQACIADLNDGLTS

SEQ ID NO: 448 - DNA, 1239 bp, Syntrophus aciditrophicus
atgacacgactcattatcatgtccatcggtggttcccccgaacctctcaggaaaagtattgccgagcatcagccggaacggatcattttctttgcatcacatgattcaataacgaaagcgggagaagtccttgaacaggtcaatccgaagccaaagtgcgaatgggagatcacggaagacccgaattccctgtttgaatgttataaaacggctaggtgttgtgttgaacgcgcgatgcatgcgggatttagtcctgaagaaacaatagttgattatacgggcggcaccaaggttatgacggcggcgctgatccttgcaaccgttggctgcccttaccgttttaattacgtcggcggcgaaactcggacaaaatcgggcttgggtgttgtggaaaacggctgtgagcagatgtattcttccatgagcccttggttgatctttgccgaggaggaacgccgccaggttattctcctctttaaccgtggccgctattcctcggtcggtgagatcatacgcatggccttgacccggaaacttcctggcgagattaccgactacttcaaatttgtcaagtattttgctgaaggattccttttctgggatcagttcaaccataaaagggctgcagattgtctttcaaagggtattaaaaatttaacggaatatttggaaagacatgaccattcccagtggaattctttcactgaagatgtccgtcactgctttgacattttaaacgatcttcttctgaagacgaataacctgaaaaaattccataccgttttgattgacgaccttctcaacaacgcccgtcgtcgtatcgccgccggctgtttcgatgatgccgcggctcgcatatatcgttctctggaactttacgggcagctcacttttgaaaaagtaacaggctgttcaaccagcaatgtcccacgaaacaaaattccggaaaccatccgggaagtgtatgtccagaaacatacagactctcaaagtggtgttatcaaactccctctgcaagcaacctttgaatttctccatacagcggatattgatgtaggacatcgttttttccaaataatcgatgagatcaaaaaaattcaaagcaaccgtaatgaatccatccttgcccatggaataaaaccggttacagaaaatgctgttgaaacaatttttcagacggtgtccaatttcacggaattcaaaaacgcctataattttcccaaattgccacaatcgtga

SEQ ID NO: 449 - protein, 412 aa, Syntrophus aciditrophicus
MTRLIIMSIGGSPEPLRKSIAEHQPERIIFFASHDSITKAGEVLEQVNPKPKCEWEITEDPNSLFECYKTARCCVERAMHAGFSPEETIVDYTGGTKVMTAALILATVGCPYRFNYVGGETRTKSGLGVVENGCEQMYSSMSPWLIFAEEERRQVILLFNRGRYSSVGEIIRMALTRKLPGEITDYFKFVKYFAEGFLFWDQFNHKRAADCLSKGIKNLTEYLERHDHSQWNSFTEDVRHCFDILNDLLLKTNNLKKFHTVLIDDLLNNARRRIAAGCFDDAAARIYRSLELYGQLTFEKVTGCSTSNVPRNKIPETIREVYVQKHTDSQSGVIKLPLQATFEFLHTADIDVGHRFFQIIDEIKKIQSNRNESILAHGIKPVTENAVETIFQTVSNFTEFKNAYNFPKLPQS

SEQ ID NO: 450 - DNA, 29 bp, Aquifex aeolicus
gttcctaatgtaccgtgtggagttgaaac

SEQ ID NO: 451 - DNA, 951 bp, Aquifex aeolicus
atgggtagggtttattacataaattctcacggaacgctctcaagacacgagaacactttgaggtttgaaaacgcagaagtaaagaaggacatccctgtggaagacgttgaggagattttcgtatttgcggagttaagtctaaacacaaaactattgaactttcttgcgtcaaagggcattccgctacacttttttaactactatggatactacacgggaactttttacccgcgggaaagctccgtatcaggacacctcttaatcaaacaggttgagcactacttggacgcccagaaaaggctttaccttgcaaagagtttcgtaataggaagtatactgaacttagaatatgtttacaaaatttcagcggacacttacctgaacaaagtaaaagaaaccaattctattcccgagctgatgagcgtagaagcagaattcaggaaattgtgctacaaaaaactggaagaagtaacgggttgggaactggaaaagaggacaaagagaccaccacaaaaccctctaaacgctcttatttctttcggaaattccctgacttatgcaaaagttctgggagaaatttacaaaactcagttaaaccctactgtgagttatctccacgaaccctcaactaaacgcttttctctctctttagacgtggcggaggtgtttaaacctatttttgtggacaatttaattatccgtttaatacaagagaataaaatagataaaacacacttttccaccgaacttaacatgacctttttaaacgaaataggcagaaaagttttcctgaaagcctttaacgaactccttgaaaccacaattttttatccaaaactaaatagaaaggtttctcacagaactctcattaaacttgaactttataaattaataaaacatttacttgaagaggaagtgtatttacctctaaattacgggggattaaaatga

SEQ ID NO: 452 - protein, 316 aa, Aquifex aeolicus
MGRVYYINSHGTLSRHENTLRFENAEVKKDIPVEDVEEIFVFAELSLNTKLLNFLASKGIPLHFFNYYGYYTGTFYPRESSVSGHLLIKQVEHYLDAQKRLYLAKSFVIGSILNLEYVYKISADTYLNKVKETNSIPELMSVEAEFRKLCYKKLEEVTGWELEKRTKRPPQNPLNALISFGNSLTYAKVLGEIYKTQLNPTVSYLHEPSTKRFSLSLDVAEVFKPIFVDNLIIRLIQENKIDKTHFSTELNMTFLNEIGRKVFLKAFNELLETTIFYPKLNRKVSHRTLIKLELYKLIKHLLEEEVYLPLNYGGLK

SEQ ID NO: 453 - DNA, 534 bp, Aquifex aeolicus
ttgaagatgacaatatcctatgaagaaataacaaacctgaagtttacgggaacacaggttgcgtattacgttatatgcaagagaaaattgtggctttttagcaaaggcttgtcatacgaatcggaatctgaattcgttgaactcggaaagctccttgatgaaagggcatttaagagggaaaaggaggaagtggagtggggagagaatccagtaaagatagattttctaaccggagaagaaggactcgtagtccacgaagtaaaacacagccctaaactagaagaggcccatgtccttcaagtcaagtattacctctggtttttagaaaaatcaggcgtaaaagtcagccacggtataatccactatcccaagcagagaaaagttctgagggtagaactcactcaggaagatagaaaggtaatcgtagaagcccttgaaaacattcagaaagttctcttggaagaaaaaccacccgaagttattaaaaagccctattgcaagaagtgcgcctattacgagttttgctatgggtag

SEQ ID NO: 454 - protein, 177 aa, Aquifex aeolicus
MKMTISYEEITNLKFTGTQVAYYVICKRKLWLFSKGLSYESESEFVELGKLLDERAFKREKEEVEWGENPVKIDFLTGEEGLVVHEVKHSPKLEEAHVLQVKYYLWFLEKSGVKVSHGIIHYPKQRKVLRVELTQEDRKVIVEALENIQKVLLEEKPPEVIKKPYCKKCAYYEFCYG

SEQ ID NO: 455 - DNA, 2190 bp, Aquifex aeolicus
gtgagggagaacctgagggaacttctgaagaaagcttgggccaagagtgacggaaccactataagggagcatacggatacactcctgaaaaacctgagcatactgaaaaacttattcggagaaaagattgaagaagcgtgtcctgaagatttcagggaattactctggaaggctcttgaactttcctgcgagtatcacgattacggaaaactccactgcttttttcagaaaaaagtgggaaacaaaaactggaaagttttaaaaggaatacccgaagtcaggcacaacctcctttctcccgcctttgtagagtgtgaagatgaaaacttaaaactcctcgtccagaaagtcgttctccaccaccacgaagtacccgaccaatttgaaaaagcaaaggaggttttaataaaagaattcggtttcagcgaaggaaaagcgaaagagcttgacaaattaatcggagaagaagaaagatttttggaaagaatagccctaaagaaatttaaaaaaagaaattctgagagtttaaagaagttttacacactcgttaagggactgcttctcaggatagaccacgcgagcagtaataaacacctgagcgaaatggaaaagggaaagttggaaaatcccgagaaaaacgtaaaagactacctgaggaaaaagggagcacagctgaacgaacttcagaattacgtgcttgaaaacagggaagagtgcctcgttgtagtcgctccgacgggctacggaaaaacggaagcgggctttattttcctaaaagacaagggattttttactctgcccttcagggtttctgcaaacggtatttacgagagggcaagggctgttttcggagaaaacgtgggactccttcactcctcttccttaatagagttaatgaagaaagaagaagatgaactggatacaaacacctttgagggaatatggaaaaattaccagcactcaaagagttttgcataccctttgacagtttgcactcccgaccagataatgcccttcgtttttaagttttctggctacgagaagtatttagccttactttcttactcaagaatagttatagatgaacttcaggtttacgcaccctacacaatggcattcatagtaaaagcccttgaagtcataaaagactttggaagcaagttcatggtaatgacagcaacatttccagaattcttaaggcgtttctttgaaaaaatggaaatacctttcaaagaatttcccgaattaaaacccaggcacaacgtaaaactcctagaagatacgctcggaagtgaaagctctataaacctcataaggtcactatctgaagaaggaaaagttctcgtaatagtaaacaccgtaaggaaggctcaggaactttctctgcttttgaacgctcccgtactccacagcaggtttttacaaaagcacagagcaaagaaggaggaagaaataaaggaatttttcagtagcggggaaaagggagtgtgggtcacgactcagctcgcggaagtatcccttgaccttgacgcggactttctggtgacagaactctcaacgatagacagcctgattcagagaatgggaaggtgcaacaggaaagggattaaggacatagaaaacccgaacgtttacgtattcacacaagagccttcaggtaagggaagcgtttacccaaaggaactacttgaattaacgagaaaagctttaacggaagggatatgggaatacgacgttaaggaaagagccattaaggaagtcttcggagaaaacataaagaaaaccaagtattacgaccagtttaagagtgcccttgaatacgttgaaggtttctggaggggaagtatttctcttaaagaaagcagacacgatgctgttcagaagttcagggacatactttcactaaacgtaatcccttaccagttcagggaggaagttttaaaggtttacaaaaagtggagagagagctcggatattttagaaagagttttagcttttaacgagctacagagttatacattttcttatccctactcggagaaactcctgagagaagggaaaataaaaaaggcgtccgaacttcaggagctcaacgtattctggataaagggagattacgacgagaacctcggctttagaatttcaaaggaagaagaccccgaggttattgaagatgacaatatcctatga

SEQ ID NO: 456 - protein, 729 aa, Aquifex aeolicus
MRENLRELLKKAWAKSDGTTIREHTDTLLKNLSILKNLFGEKIEEACPEDFRELLWKALELSCEYHDYGKLHCFFQKKVGNKNWKVLKGIPEVRHNLLSPAFVECEDENLKLLVQKVVLHHHEVPDQFEKAKEVLIKEFGFSEGKAKELDKLIGEEERFLERIALKKFKKRNSESLKKFYTLVKGLLLRIDHASSNKHLSEMEKGKLENPEKNVKDYLRKKGAQLNELQNYVLENREECLVVVAPTGYGKTEAGFIFLKDKGFFTLPFRVSANGIYERARAVFGENVGLLHSSSLIELMKKEEDELDTNTFEGIWKNYQHSKSFAYPLTVCTPDQIMPFVFKFSGYEKYLALLSYSRIVIDELQVYAPYTMAFIVKALEVIKDFGSKFMVMTATFPEFLRRFFEKMEIPFKEFPELKPRHNVKLLEDTLGSESSINLIRSLSEEGKVLVIVNTVRKAQELSLLLNAPVLHSRFLQKHRAKKEEEIKEFFSSGEKGVWVTTQLAEVSLDLDADFLVTELSTIDSLIQRMGRCNRKGIKDIENPNVYVFTQEPSGKGSVYPKELLELTRKALTEGIWEYDVKERAIKEVFGENIKKTKYYDQFKSALEYVEGFWRGSISLKESRHDAVQKFRDILSLNVIPYQFREEVLKVYKKWRESSDILERVLAFNELQSYTFSYPYSEKLLREGKIKKASELQELNVFWIKGDYDENLGFRISKEEDPEVIEDDNIL

SEQ ID NO: 457 - DNA, 1596 bp, Aquifex aeolicus
atgggtgtgaagttttacatagacaactggcttaccgcttcctcaggcgttggactgattgaagttttgcaagatgcagaagttgagtacaaggaccttgtaaaagacagcaggaaactggaacttcctgaagaattattcgaaaaacttcccgagctttatgctgattttttaacaaaaggtatagatttaactatgaaagagcagattcttaaaagcaaaaaattaagtattgaaactttaaaaaacagattagagaatccatatacttttattaatggatatgatattattaaatctttctatcgtaatagtatatttgcaaacaacaatccttataaagatataataaaacaagaaaatagcaagttgttaaattccattttaaatgatattcaccgtaaagaggatatggattacgagtctataatagatgttttggaaaataaggggtattttgaaaatataagaaatgtaataaaatattatctaatagaaactttaaaacttataattagcaatcaagaagacaaaaacgctcctctttgcttcttttgtcgtgaaagacacacctacgtctataaaggaaagtacagagtatttggagcggaacacttcactccgctttccgcaagcgaggacactctcccaaacctcttctggaacggaagaaacaaaatgtacctgtgcccttactgtgagttttacctgtttttcgcagcttttggattcacaaaggtcgggaacaacaggttcttattcgtttatatacccgacgatttagacagtcttatatcaataaattctcaactaaaaagtaaagaaaaggttgagaagaacattctcggagaattgttcagagtggttaagttcttaagaaacgtagagacacaaaaagctcgttggattcttgaaaacatttacttcgttgagatcgaaaaggttagcgaagccacagcaaacatttactcattcagcataagtccgagacttgcgaaagttttaaagaattatatagacaaatatcctccgaactttgaaagtgtctttcctaaattcgttgaatacgtttacagcgggagaagcctttacgaattcttgtttaaaattctgtcaggtttctttttcccgaagcgttatcaaaatccaaagggatacgatgcggatttaattaaaaaaggtatgagttttaaggaatttttacctaaaaagctgctttactttataaaatttcaggaggagctcatcatgggagaaagttttgagaaacaaattaattttgcctacagggaagggctgaatttaaagaaaatgtatgagaaggaactcggaaaggaaaaagcaaaagataggataaaaaccctctcttacaggattcttgaagcggtaaggagaaaggaccttgacgcctttgagcaaaacttaataagggcttacatgcaggtggaaagggaaataccctacatctttgttcaggctttgaaagacgagaacttcaaccggattgtttacgcttttctgataggactaaacgggagggattggagtgagggagaacctgagggaacttctgaagaaagcttgggccaagagtga

SEQ ID NO: 458 - protein, 531 aa, Aquifex aeolicus
MGVKFYIDNWLTASSGVGLIEVLQDAEVEYKDLVKDSRKLELPEELFEKLPELYADFLTKGIDLTMKEQILKSKKLSIETLKNRLENPYTFINGYDIIKSFYRNSIFANNNPYKDIIKQENSKLLNSILNDIHRKEDMDYESIIDVLENKGYFENIRNVIKYYLIETLKLIISNQEDKNAPLCFFCRERHTYVYKGKYRVFGAEHFTPLSASEDTLPNLFWNGRNKMYLCPYCEFYLFFAAFGFTKVGNNRFLFVYIPDDLDSLISINSQLKSKEKVEKNILGELFRVVKFLRNVETQKARWILENIYFVEIEKVSEATANIYSFSISPRLAKVLKNYIDKYPPNFESVFPKFVEYVYSGRSLYEFLFKILSGFFFPKRYQNPKGYDADLIKKGMSFKEFLPKKLLYFIKFQEELIMGESFEKQINFAYREGLNLKKMYEKELGKEKAKDRIKTLSYRILEAVRRKDLDAFEQNLIRAYMQVEREIPYIFVQALKDENFNRIVYAFLIGLNGRDWSEGEPEGTSEESLGQE

SEQ ID NO: 459 - DNA, 660 bp, Aquifex aeolicus
atggagtgtctaaaagctgagttcttttcaccgatagcccttttcaaaacacccttttccataaagggaatagaaacctatccgctcccgccctactccacggtaatagggctcttgtacacagcttctgggaaaaagtggaaaggagagaggtttaatatttccgttcagggagattacgaggctatattcagggattacgtaaggtttaggaagtacaacaaaaaagataaaaaacttgaaaccttgcccttagaagttccgcttttttacaacttccgcttaacggttcatatcttaggagatgaaaaccttttaaaggagtttgagaaagctttaaagtttccttacgtatttccttatctctcgggaggagagtacccggtaaaaataacgaaagtaaaaatggtggcgtgcagaaaagagtactttgacacattcaatattccaaagaacgcttacatcccggaaaacatttttacggaggagttcagggtttctctggaaggacacggcgtatattacagagttccttctttcctaatttctcaaaaacccagacagcacgagtgggtaggtgtttactacgtccagaagggcacgaaagtttcagagatggaacttctggtagatgaggagggagaacctgtatgggtgtga

SEQ ID NO: 460 - protein, 219 aa, Aquifex aeolicus
MECLKAEFFSPIALFKTPFSIKGIETYPLPPYSTVIGLLYTASGKKWKGERFNISVQGDYEAIFRDYVRFRKYNKKDKKLETLPLEVPLFYNFRLTVHILGDENLLKEFEKALKFPYVFPYLSGGEYPVKITKVKMVACRKEYFDTFNIPKNAYIPENIFTEEFRVSLEGHGVYYRVPSFLISQKPRQHEWVGVYYVQKGTKVSEMELLVDEEGEPVWV

SEQ ID NO: 461 - DNA, 1074 bp, Aquifex aeolicus
atggctaaagctttaactttgaccatcataacgagcaaagcttccagtttgaactacggggaaactatagggaatgtatcggttctgaaaaaggtatctctgggagacggttcacagataacatacgtttccgacaaggctctgaagtacgaaataaggaggaaagggaaggaagaaaaaggctggaaattgcttgacaagttaataaaggaatatatacaaaacgaaggaaggattgttataaaagaaagagaaagcgaagaaaagaagaagaagaagaagaaaattcgtgtatacgatgtagattctctaggaatagacttagtgaaaaactttgaagaatttgatttattcggaggtttattcactaagataattgtcaatggcaaagaagttaaaaagcttaagaaggataaaatatctgaagaggatatttactatcctgaggaatatgattcagtaaaaagaacctctcctgtaaaagtaacctacgccttttccatttcaaagtttcagggagaccttgactttatgaataacatagatgcctacaacaggtatataaagcacgttggagaagcggaagagcaaaggattgtgcaaaccgaacagcacacctctcactactactacaccctaacggttgaccttgacagagtgggcgtatgggaaaaggaagagggggttgaggaagtcctttcaaatgaagaaaaagccaaaagagtgaaggatctccttgacataatacttactttgagtagacagataaagggaaggtgggagaatctgtctcccgttttcgtgatagggggagtgttttccgttaaaaatcccttctttgaagacggaattcttgcaaaagaagttgataatcagttactcctaaatgttcaaagactaaaggactgtgcggaactcgttccagaaggagaagaaatcctctgcggtataagaagcggagtttttgcaaatgaagaggaaataagacaggagctcaacgcaaaaagcgtgaaagaggtatttgaagagttgaagaagagggtggaggaagtttatggagtgtctaaaagctga

SEQ ID NO: 462 - protein, 357 aa, Aquifex aeolicus
MAKALTLTIITSKASSLNYGETIGNVSVLKKVSLGDGSQITYVSDKALKYEIRRKGKEEKGWKLLDKLIKEYIQNEGRIVIKERESEEKKKKKKKIRVYDVDSLGIDLVKNFEEFDLFGGLFTKIIVNGKEVKKLKKDKISEEDIYYPEEYDSVKRTSPVKVTYAFSISKFQGDLDFMNNIDAYNRYIKHVGEAEEQRIVQTEQHTSHYYYTLTVDLDRVGVWEKEEGVEEVLSNEEKAKRVKDLLDIILTLSRQIKGRWENLSPVFVIGGVFSVKNPFFEDGILAKEVDNQLLLNVQRLKDCAELVPEGEEILCGIRSGVFANEEEIRQELNAKSVKEVFEELKKRVEEVYGVSKS

SEQ ID NO: 463 - DNA, 942 bp, Aquifex aeolicus
ttggaaggcataaaagttttagcaaagcagttcgggaaaataaaaactcctcaaggtttggcagttgcaattgcgttgataaccgcaatagcctggtttcccgacggacttgcgggatttttaccctcccttaaatcaaatccctttcaagcaattatcggagcgattttaacgattcttggactatcaattatattctttttacacaaaaaattaaggcggggacaaaaagattctataattgccgagttcggtttcatagttttaacccttatcttttccttaattgtgtttaatgatttcgcaataacgcaatttattacctcttcattggtatttttctccgcctggttgcacgtaagggaaatggagattgtggattacactgtgagagaggtaagaccgagtaatgtaaaggctacggtaatatttttaagcagtgcaaaatatgatgaaaaatttaagaaattaatggaaaaggtagaagaaattcctacaataaatgatttctttgattttcttgaaaaagaaaaaatgagactgccatgggaaatgcagttaaggctcataaacgaattttcccgttccttgaaatacgtatacgtaataggttccgtaaatagttccagcggttcctttgaacaaatagaagattttaaacttatcgtgaataaattctttcctcaaattgaagtaattaagtacagggaaggattagactttgaaaatctggagaaaaactttggagtgctgaaagaaatttactcagaactaaagacaaagggtttaaaggaaagggagataattattgacacaacagggggacagaagatacagagcatagcgggagcactttattctaccgcgtacgacagatttttcgcttatgtttccacaaactccaaaagcgttaaggtttttgatgttgtacctacggagtaa

SEQ ID NO: 464 - protein, 313 aa, Aquifex aeolicus
MEGIKVLAKQFGKIKTPQGLAVAIALITAIAWFPDGLAGFLPSLKSNPFQAIIGAILTILGLSIIFFLHKKLRRGQKDSIIAEFGFIVLTLIFSLIVFNDFAITQFITSSLVFFSAWLHVREMEIVDYTVREVRPSNVKATVIFLSSAKYDEKFKKLMEKVEEIPTINDFFDFLEKEKMRLPWEMQLRLINEFSRSLKYVYVIGSVNSSSGSFEQIEDFKLIVNKFFPQIEVIKYREGLDFENLEKNFGVLKEIYSELKTKGLKEREIIIDTTGGQKIQSIAGALYSTAYDRFFAYVSTNSKSVKVFDVVPTE

SEQ ID NO: 465 - DNA, 336 bp, Aquifex aeolicus
atgaatgaaatccttaaaacagaagatgaagttgtcaggtggagcgtaaaaaaaataaacgatgatactactttaattgaatttgaactgaaaagagatttagtccctgaagatttaaaaaagataaatccaccggatgcagtaaaaaataagttcgcaaatacctttatcgtgctttcaggaaggggcccgatatggctttatgggtttttaatacacttttaccacccgacaaagggaataggagtatttgacccaaggcttggaggggcggtggtagtaagttcacatagtccgaacaagaaagtaggagacgttataaagtgggagggatag

SEQ ID NO: 466 - protein, 111 aa, Aquifex aeolicus
MNEILKTEDEVVRWSVKKINDDTTLIEFELKRDLVPEDLKKINPPDAVKNKFANTFIVLSGRGPIWLYGFLIHFYHPTKGIGVFDPRLGGAVVVSSHSPNKKVGDVIKWEG

SEQ ID NO: 467 - DNA, 1362 bp, Aquifex aeolicus
atgaaaaaagtagttattgcaccgtggggagatcctacaaactggcaaagggttaagtattcgtataacgatcatgaagataaatacccttctgcaacaggaataataataaaagctgaaaaacccgactcagttatcctggtttgtcctgatagtttagcagaaaaaaggataccatataaggaaatcaagatacaatgttctggcaacttatcagacaaaacacaaggtaacttaccttttgagaattacgaggaaattaaatctaaagtagagaataaaattaaggatttcttttctaagaatataaattttcataaaaaacccgatgtaataatatcctatagttttggaagttataacactttagaatttgagggacaagcggaagatttctttgctggagtattgaaaggattggtatataaattcactgagtatttagaaaaaggaattcctgaaaaaattgaaattatcctcgatgttagccatggaataaactacacgactgttatgacatatgaagcggtgagaacactcgcacaattattagcatacttcacggaagttagtttaaaagttttaaatgcagatccagtaatcggtaggaatattcaaaaacctttaagaataaatgaaatagaatactacagtagtatatttccaaatttagttgtttatagaattaaaaaagaagacaaagaatgcgaacaaatactggaagcatatgatgattcaatcaatgaaattggcgataatatgaaattagaaagagagcatatattcctttcagctattattcatggaactcctttatacatacttacatacatgccttcttcgaaagatttaaaggcaaaaatagataatgctgcaggctattacgaaaaaaatataataatagaaaatgaaataggtgagaagaaaataaaagttaaaaggaaattacgatttacggaaaattatataaccatgctcaaagcttactttcttagttttattttggaaaagaaaggtttttccaagaaagaagaagttcttcttgaagatattaataagttaaatgaaatgatatttagagaatttcctgttttaaagcataggataagtaaagaaactaacaacattaatgaaagaagagacaacataccggaagattttctaatatatagagaaataaatagaagaggtaatcgagattttgaggagagaaatttcttcgcacacgcaggttttgaatataattcagttatgctaaaaaaagatgacaaggatattatcttgaaagttaatgaacaaaataaagaaaaaattgaaaatgctttaaaagaagccatccagtcactacttttaaggaggtaa

SEQ ID NO: 468 - protein, 453 aa, Aquifex aeolicus
MKKVVIAPWGDPTNWQRVKYSYNDHEDKYPSATGIIIKAEKPDSVILVCPDSLAEKRIPYKEIKIQCSGNLSDKTQGNLPFENYEEIKSKVENKIKDFFSKNINFHKKPDVIISYSFGSYNTLEFEGQAEDFFAGVLKGLVYKFTEYLEKGIPEKIEIILDVSHGINYTTVMTYEAVRTLAQLLAYFTEVSLKVLNADPVIGRNIQKPLRINEIEYYSSIFPNLVVYRIKKEDKECEQILEAYDDSINEIGDNMKLEREHIFLSAIIHGTPLYILTYMPSSKDLKAKIDNAAGYYEKNIIIENEIGEKKIKVKRKLRFTENYITMLKAYFLSFILEKKGFSKKEEVLLEDINKLNEMIFREFPVLKHRISKETNNINERRDNIPEDFLIYREINRRGNRDFEERNFFAHAGFEYNSVMLKKDDKDIILKVNEQNKEKIENALKEAIQSLLLRR

SEQ ID NO: 469 - DNA, 1122 bp, Aquifex aeolicus
atggcaaatactatagtagtaggcgaattgatcttcggaacaggttatttttccacaggaaaactagaagtagggaaagaaaaaggaaaggaaaccgataataaaaaaaactttatccataaagctttaaaaaaagtagattttctggaggaattcgaatcccttaatcttttattaaataagtacattccaattccttgcggtgatatagtcactataaaaaacaataacgaaaaactatggttaaaagatgggactattaacgaagaactcaaaaaaatatttttagaagaaattattaaagatgacaactttggaaaattaaaagaaaagttaaagaatttttctgagatattgaagagaaaaaacagagaaattgcgcaatctcttttaaatcaaggctatgtaaacgttttcaatgaggatgaatttcttaagctgaaaactgctgaacgtcttatagtgggacttggaacgactcacgtttttgaaactggcttagcgcttcatcatctttttggaattccctatataccttcttcctccttaaagggtatagttagaatggctcatttttgggaaattgtagaggaaaatataaaaaatatcaaagaagataaaaaagatgatgtaataaaaagattacaggaaaaactccagaaaggtgatatcaggaaagaacagaataaagagtttcttatacatatgcttcttttcggaacacaaaagtttaagggattacttacatttttagacgcttatcctatgattgacgaaagtaataagaataaaatttttgacttagatttgataaatgtacattataaaagttattacactcagaataaaccgcccggtgattgggaaaatcctaaccctgtttatttcctgactgtaagcaagggtatagagtttcacttttgggttttatttgatagctatagggctgagaaactgaaaaaatataacgattttgaaaatgtaataaatgaattattagacaacaattatgagaacttacggaataagcttaaggaactgctagaagatactcttacactttacggtgtaggtgcaaagacaaggctggattatggaatttttgatggagggaataaatga

SEQ ID NO: 470 - protein, 373 aa, Aquifex aeolicus
MANTIVVGELIFGTGYFSTGKLEVGKEKGKETDNKKNFIHKALKKVDFLEEFESLNLLLNKYIPIPCGDIVTIKNNNEKLWLKDGTINEELKKIFLEEIIKDDNFGKLKEKLKNFSEILKRKNREIAQSLLNQGYVNVFNEDEFLKLKTAERLIVGLGTTHVFETGLALHHLFGIPYIPSSSLKGIVRMAHFWEIVEENIKNIKEDKKDDVIKRLQEKLQKGDIRKEQNKEFLIHMLLFGTQKFKGLLTFLDAYPMIDESNKNKIFDLDLINVHYKSYYTQNKPPGDWENPNPVYFLTVSKGIEFHFWVLFDSYRAEKLKKYNDFENVINELLDNNYENLRNKLKELLEDTLTLYGVGAKTRLDYGIFDGGNK

SEQ ID NO: 471 - DNA, 900 bp, Aquifex aeolicus
atgtatgagtacggtcagttactaaccttatacgcagtgacaccaatacatataggttcaggacagagtatatcctttatagacctcccaattcaaagggaaagacatacaggttttcctatacttagatcaaatggaataaaaggagcattaagaagtgtagctgaaagagtttggaaggataaggctaaggttgaaactgtatttggaccagaagatgatgcttccaagtttgcaggttgtgtaagcataactgatgccaggatacttttttaccctgttcgctctgtaagaggtgtttttgcttggattacaagtccaattgttcttagaagattccaagaagatctgaggagtattggaaaagaaataaacattaaagttttaaagaatggcaaagaagtacctagtaacttaaatttagaagaaaatgaagccatattattttcagatggtttgattaaagatggaaaattatttcttgaagaattcgcatttaatcccattttaaatgctccagaaaatgtagattgggacttttttaatacgattatcccttcagatgagttagtaggccttcttaggactcatttagtaattgtttctgacaacgttttcagggatttagtaaattacgctgtagaagtaagaacgaggataagaataaatcaagcaactggtactgtggaaaggggagctttatttactgaagaattcattccttccgaaagtatcttttactctttattaaatataagtgaaccgcataataaggaagtttttgagaaagcagaaaaagttagagaagaagtaaaggatctaataaatagatgtaaaataatccaggtaggtggggatgaaagcttaggaaaaggattcataagacttaacctttgttaa

SEQ ID NO: 472 - protein, 299 aa, Aquifex aeolicus
MYEYGQLLTLYAVTPIHIGSGQSISFIDLPIQRERHTGFPILRSNGIKGALRSVAERVWKDKAKVETVFGPEDDASKFAGCVSITDARILFYPVRSVRGVFAWITSPIVLRRFQEDLRSIGKEINIKVLKNGKEVPSNLNLEENEAILFSDGLIKDGKLFLEEFAFNPILNAPENVDWDFFNTIIPSDELVGLLRTHLVIVSDNVFRDLVNYAVEVRTRIRINQATGTVERGALFTEEFIPSESIFYSLLNISEPHNKEVFEKAEKVREEVKDLINRCKIIQVGGDESLGKGFIRLNLC

SEQ ID NO: 473 - DNA, 888 bp, Aquifex aeolicus
atgaaaaaagaacatcaaaaaacattaacatttgaaataataactcctgttgtaatggcaggtacttataaagatgaacccgaacttcgtattccctcaataaaaggcatgctaaggtggtggtttagatttttctatgcaagtcataaccagagtattgataaattaagagaacatgaaaatgagatttttggttctactgaaaaagcttgccagttttatatgcatttaaaatattcccaaaaacttaccgatgcgtatttggctatgaataaaagatatggaagatataacaatataaaaagaaaagcactagaaaaaaacgataccttccgaatagatttcatatactctcctttttttacatataaaaaggaattaaatactactttgcaattgctctcctttttgggaggaatcggtgcaagatggagaagagggtttgggagtatacagttaaaaaatggagaagattataaaagttttgataaattaaaagaaaaaattgaaaaagttctcaagggaaaaggcgaataccatcatgatggttttataaatataaacaacgttgatatttacttagttaaacccaaacgagataatttttggattgattctctaggagccatgaataatttaagaaagaaagtttacaaggaatttaaatctgaaacaaatataaaagcaatagcgtgtaagcctaagggtggttctagagccgtatcacctttaataattcaaataaaaaaatttagtgaaggaaaattttatggaattcttattgtttataatgaatgggataaatatgaagaatttaagaattttataaataacaattccgaactttcctttgagcaattattaaaatctaagcctagaaagatataa

SEQ ID NO: 474 - protein, 295 aa, Aquifex aeolicus
MKKEHQKTLTFEIITPVVMAGTYKDEPELRIPSIKGMLRWWFRFFYASHNQSIDKLREHENEIFGSTEKACQFYMHLKYSQKLTDAYLAMNKRYGRYNNIKRKALEKNDTFRIDFIYSPFFTYKKELNTTLQLLSFLGGIGARWRRGFGSIQLKNGEDYKSFDKLKEKIEKVLKGKGEYHHDGFININNVDIYLVKPKRDNFWIDSLGAMNNLRKKVYKEFKSETNIKAIACKPKGGSRAVSPLIIQIKKFSEGKFYGILIVYNEWDKYEEFKNFINNNSELSFEQLLKSKPRKI

SEQ ID NO: 475 - DNA, 744 bp, Aquifex aeolicus
gtgaggtttttaattaagatggagaacctaaaagaagaacctgcaaaagttcgcttagactacagaagcaggtttatctcactgctaaaatccgttttaggagaggaatattactcaaaccataagattaagcccttcacattcgccgtattcttcggaaaagaggcaaaaataagcaacggatatatagaaaatgtaaggaccataaattttcgtttttcttcgggagactttttaacgatagccaagttttacaacggaatattacaattgaaaaagaaccagtatatccatccaattgggacaggaaaatttaagataattgactttcgtcctgaaaaagaaagagaaattataggattttttaaaactttatccccgattgttattgaaagaataggttcaaagcctaaagatagtcctgaagaaaggtatataacacctgatgaagaaagttttgaagaaagtcttgtggaaaacatatacaggagatacatagcaattatgggtagcgaacctcaattttctaaatttaagtttatccctgtaaaagtaaagaaagaatacgtcagacattacggcggaattgtgaaaacgtttataggaaaattcaaaatagaaacggattctaaggatttgttagaatttatttataagtacggattaggagtaagaacggggcagggattcggatacttggaggtggaggatgaaaaaagaacatcaaaaaacattaacatttga

SEQ ID NO: 476 - protein, 247 aa, Aquifex aeolicus
MRFLIKMENLKEEPAKVRLDYRSRFISLLKSVLGEEYYSNHKIKPFTFAVFFGKEAKISNGYIENVRTINFRFSSGDFLTIAKFYNGILQLKKNQYIHPIGTGKFKIIDFRPEKEREIIGFFKTLSPIVIERIGSKPKDSPEERYITPDEESFEESLVENIYRRYIAIMGSEPQFSKFKFIPVKVKKEYVRHYGGIVKTFIGKFKIETDSKDLLEFIYKYGLGVRTGQGFGYLEVEDEKRTSKNINI

SEQ ID NO: 477 - DNA, 402 bp, Aquifex aeolicus
atgcaaactagaatccaaaaagtagtaaagttcgcttatgggtgtgtaaatgaagtaaaaggaagggagcaaatagaggaaaaatacgcttcttacgtacgcaagcttccatcaatgattatacacaacggtctcttgccgactgtagcattcataaggtcaaaagctgggattgatgctcaaaataaactctccccggaaaaggaggcttggaaaaaaatagaaaaccatattaagaactacttgataaaaatagaaaacgtggaagtgcctgattccctaactcggctttttgcggaaatggatttttcccggtacaggttatatacccaaaaaatactattttttactcaatggttaaagagagtggcagaaggagaattgaaatccgaagaagagtaa

SEQ ID NO: 478 - protein, 133 aa, Aquifex aeolicus
MQTRIQKVVKFAYGCVNEVKGREQIEEKYASYVRKLPSMIIHNGLLPTVAFIRSKAGIDAQNKLSPEKEAWKKIENHIKNYLIKIENVEVPDSLTRLFAEMDFSRYRLYTQKILFFTQWLKRVAEGELKSEEE

SEQ ID NO: 479 - DNA, 888 bp, Aquifex aeolicus
atgagaagagaaacttactttattaaagcaattaccccgctacacattggtactggacaaggtttaacccatatagacctccctattgccagagaagttcacacgggctttccttttattcctggatctgccataaaaggctgtttaagagaataccacataaaaaaagtagctaggaatacagagcttacagcttcaatgattgatgaaatactgcaagaaggggaaataagaggaaacttaaacgataaagaaaaaaaatacttaaaaatgctaatagatatcttcggtacggctggagaaggttctgaagaatcttccgcaagtgcagggaaagttatatttacagatgcgagactcttcctctttccggtaagaagcactaacggagtatttcaactagtaacatgtccctatgttataaatcgctatctggaagatacaggcgagaaagagtgtttttgtttagatttaccggatgataccgctgttgtttattttgatagatatcctaacattgatgaagttatgctggaagaatttactttaagaaaacaaaggaacaaaaaatttgaagaaataatatcaagaattcctctggaatcgtatcaaaaggaaagagttctttgtgtaagtgacagtgttttttcctacatggttaaaaactacaccgagattcaaacccatataaaaataaatcgcgatagcggaacggttgaaagcggtgcactttggacggaagagtaccttccggcggagagtgttttatactttaatcttttctacgaaaaacaaaatcttaatcttgaagttcctgaatttttccatttgggaggggatataactacaggaaaagggctggttaggaggttaggaaatgcaaactag

SEQ ID NO: 480 - protein, 295 aa, Aquifex aeolicus
MRRETYFIKAITPLHIGTGQGLTHIDLPIAREVHTGFPFIPGSAIKGCLREYHIKKVARNTELTASMIDEILQEGEIRGNLNDKEKKYLKMLIDIFGTAGEGSEESSASAGKVIFTDARLFLFPVRSTNGVFQLVTCPYVINRYLEDTGEKECFCLDLPDDTAVVYFDRYPNIDEVMLEEFTLRKQRNKKFEEIISRIPLESYQKERVLCVSDSVFSYMVKNYTEIQTHIKINRDSGTVESGALWTEEYLPAESVLYFNLFYEKQNLNLEVPEFFHLGGDITTGKGLVRRLGNAN

SEQ ID NO: 481 - DNA, 978 bp, Aquifex aeolicus
atgaaaatatacctgtttaaaccatacgatgttattggttttgggggattaaaaaatttttctgcaggggaaactcacatacaaaaaagcatatttccaccacctataatgagatttttccacatatttaatagtgtttatggtgttttcttatacaaagatggaaatttatttcttcctgttccatccgattgtctcgtaaaacgcaaagaagagagtggaaaggctaaaatatctcctctagaatttcctcctctaataagaggtgatttagaagcctatgaaagagcaaatggttttatatcctttagtgacttaatgaacaagtatgctaagaacatagatgggttcaaaatctatttacttgaggaattcttaaaaaaagaaagtagagtaggtattactttagataaggaaagaagagttgtaagatcaataaaagaaattaatagaaaggaagaaaagggcttgctttactctcaagacttttttcgcttcaacgacggagttaagctagcagttttaggagaaattaacaaggacattgtaatatcaggaaagcagtactttagacttggaggagaaggtaaaatcgtctcgtttaaacatacagaacatattaatagttttttagaagggaaaatcaagataaaaaatggaaactattataaattttattgtttaacacatgcatatataaacaatggaataatagaaagcaaaattcaaactatatgcatagaggggattaattttgaagtggaatggctgtataatgggggagtagaatacgtttctggatataataaacccttcttggaaatgctaagaccgggaagtgtattaattttaaaagctaaaaatgaaggagaaattcaaaggttaaatcaaatatctacaaacgttcctatttcgaatatcaaaaatttcttaaatagaggatggaactcaggaataattgtggagggagttaaatga

SEQ ID NO: 482 - protein, 325 aa, Aquifex aeolicus
MKIYLFKPYDVIGFGGLKNFSAGETHIQKSIFPPPIMRFFHIFNSVYGVFLYKDGNLFLPVPSDCLVKRKEESGKAKISPLEFPPLIRGDLEAYERANGFISFSDLMNKYAKNIDGFKIYLLEEFLKKESRVGITLDKERRVVRSIKEINRKEEKGLLYSQDFFRFNDGVKLAVLGEINKDIVISGKQYFRLGGEGKIVSFKHTEHINSFLEGKIKIKNGNYYKFYCLTHAYINNGIIESKIQTICIEGINFEVEWLYNGGVEYVSGYNKPFLEMLRPGSVLILKAKNEGEIQRLNQISTNVPISNIKNFLNRGWNSGIIVEGVK

SEQ ID NO: 483 - DNA, 1866 bp, Aquifex aeolicus
atgaagctcctcgtttttactttttcacctgtacagggttttatagagaaatcaagaaaactaagggatttttttaattcgagtttaatactctcatatattacaaaaaaacttattgaaaaacttaaagaagatcccgatgttgaaatcatataccctgctataaaggaacacgattccgagaaattgctaatgaactatccaaatagacttgttgcaaaatttgaaaaagataaaaattactgtgaagaattaaaaaatcaattttctaaaatatgggaggaaatttatacgtatattgctgataaaattaaaatacctgagagtgtaaaagcaacttttaaatcccataataaacattacttcacttatttctgtgaaattcaagaggaagtagatagagaggagtggatgacagaactaaaagttaatgaggaaacgctgaaaaaatttaaaataaaccaagaaaatccttatggattcacttacgatcttcttgaaagaaagctcggagcgaggaaaactttcagaccttattacggacgagttgacgaaaataaaaaagttcacggatgtaccctttgcggtgaaagaccggcactagatctgaactgggaggaattaagaaaaaatttacctccctatcaccttgatgatagtgaaagattatgcggggtttgtttaacaaaaaggtttttccacttttatttaaaagaaaaggaaggaataaaagatttagctaagtttcatagtacaagacactttgccttagctccacttataaagaaggtagaaaaagataagctatcagaggaagaaaaggaaatattgagagaaatattaagcatgtatactaataatcaaataaatgatggaaatttgaaagaactcatatacaacaatatagacgaattaacctataaaagagttaaagctctcgtgagaaaaagactagataaaattcctgataaagataaagaagtaagactaaaagaattcgagaaaaaatttaaaaattcctacttttcgatcttaatggcagacggagatgaaatgggaaaatggcttggtcttaagcctgaaaagagaaaggttgagttaacggaaaactttcacaaaaagttctctgaggctttattcaagtttgcacaaaaaattacaaaaattgaagataatatatgtttaaagtttgtatacttgggaggtgatgatgttcttgcagttgcacacccatctgtaattcttaaagctgcaaaaataattagaaaaaggttttctgaaatcctaaaaaaagaactcaagcctagtaatattaaagaagaccctactatgagtgcagggttggttatagctcatgagaaagaaaacttagcgtttgttttagaacaccttagaaccgctgaaaggagggcgaaaaatgaaggaagaaacagactgtgtattagtgtaataccccataacagctatccgagagagcttgttttgaaatgggacaacttagaaaattttatcaaattaatagaatactttaagagtgaaaagctatcgtctagaatcccatattatttacgaaaggaattagaaatctttataataaacgaagaaagtgtagtaaatatgaaagatatcgctttaagtgtaataaaaagaattttaaaaagacaaataagtaaaaatcagaatgataaaaaactcaatgaatatgaatattactcactaattactcaaatagaggatttaataaatgaaagaattaaggaaacaggaagtcttaaaaatgccttagagtatgtactcaacacattttacatagcccgcttcatagctaatatggagggcttaaaacatgaaaatatacctgtttaa

SEQ ID NO: 484 - protein, 621 aa, Aquifex aeolicus
MKLLVFTFSPVQGFIEKSRKLRDFFNSSLILSYITKKLIEKLKEDPDVEIIYPAIKEHDSEKLLMNYPNRLVAKFEKDKNYCEELKNQFSKIWEEIYTYIADKIKIPESVKATFKSHNKHYFTYFCEIQEEVDREEWMTELKVNEETLKKFKINQENPYGFTYDLLERKLGARKTFRPYYGRVDENKKVHGCTLCGERPALDLNWEELRKNLPPYHLDDSERLCGVCLTKRFFHFYLKEKEGIKDLAKFHSTRHFALAPLIKKVEKDKLSEEEKEILREILSMYTNNQINDGNLKELIYNNIDELTYKRVKALVRKRLDKIPDKDKEVRLKEFEKKFKNSYFSILMADGDEMGKWLGLKPEKRKVELTENFHKKFSEALFKFAQKITKIEDNICLKFVYLGGDDVLAVAHPSVILKAAKIIRKRFSEILKKELKPSNIKEDPTMSAGLVIAHEKENLAFVLEHLRTAERRAKNEGRNRLCISVIPHNSYPRELVLKWDNLENFIKLIEYFKSEKLSSRIPYYLRKELEIFIINEESVVNMKDIALSVIKRILKRQISKNQNDKKLNEYEYYSLITQIEDLINERIKETGSLKNALEYVLNTFYIARFIANMEGLKHENIPV

SEQ ID NO: 485 - DNA, 37 bp, Archaeoglobus fulgidus
gtaagaaagggaggctcctgaaaatggagattgaaag

SEQ ID NO: 486 - DNA, 870 bp, Archaeoglobus fulgidus
atgtccttctccctccaactcaccagacttaaagccagactctacttcccccagtatcaccttccgcccttcctcggcaacaagttcagagggggctttggcagcgttctgctgaaggccgtctgcagctaccttaaaccatcctgtaacatctgcaagtctgtcgatgactgcctctaccatgccctttacacaagagacaggcagaaaaggggcagatcccagcctgtacgccccatcgtgttcatcccgccctttttcggcaggtctgtaagcggaagaggagagctaacgctttacatcaacgtttttggggactacgtcaagtacttaccacacatcatatatggtctccgatatcttggcaaaatggggctcaatgctacaagcaaatacgaaatagtaagcatttcagatgccataagcggaaaggaggtttacgatggcgaaacggtttttgttgagaaccttagtagcattgagctgggcaaaatcaaacccagagaggtggaaaaggagatagaggttgattatctaactcccatggaagccaaaacccccataaatcttccattcctcattcacatagtgcgaaggaggctaatcctcttcgtcaacgagtatggcagtggagaggtgcctgaattttactgcgaagctgaaacactggaatcaagctgggagaaacacgagttgcatcacaggtcgaaaaggcaggggttaaggtcttttttcggtgttacggggagggcgagatattcgatttcagaaattgacgataatgctctgactctcctgtcaataggcgagcttattggcggtggagcaaaggcgagcttcgggatgggatttttcaggattcggagttga

SEQ ID NO: 487 - protein, 289 aa, Archaeoglobus fulgidus
MSFSLQLTRLKARLYFPQYHLPPFLGNKFRGGFGSVLLKAVCSYLKPSCNICKSVDDCLYHALYTRDRQKRGRSQPVRPIVFIPPFFGRSVSGRGELTLYINVFGDYVKYLPHIIYGLRYLGKMGLNATSKYEIVSISDAISGKEVYDGETVFVENLSSIELGKIKPREVEKEIEVDYLTPMEAKTPINLPFLIHIVRRRLILFVNEYGSGEVPEFYCEAETLESSWEKHELHHRSKRQGLRSFFGVTGRARYSISEIDDNALTLLSIGELIGGGAKASFGMGFFRIRS

SEQ ID NO: 488 - DNA, 174 bp, Archaeoglobus fulgidus
atggcattagatagggttgacaggaatataatcgaaggcaagatagacataattgagactgcacacatcatctcatctttaggactcgaaagagctgagagttacagcgaaatgttcgaaatacttggaaagacggggataattgtgaaaaactctcttcaaaacaggttttga

SEQ ID NO: 489 - protein, 57 aa, Archaeoglobus fulgidus
MALDRVDRNIIEGKIDIIETAHIISSLGLERAESYSEMFEILGKTGIIVKNSLQNRF

SEQ ID NO: 490 - DNA, 1032 bp, Archaeoglobus fulgidus
atgaaatcgaatgtagttgtaaaataccccgttaactcagaattagcaaattatgcagagaaattctggaaaaaagagttagcaatatacaatcttagcttaatcctcaacaaaatgacgccattcgttaaaaggaggtcagagtcttacaaatcatcactttcggcggtgaaggaaatctttaaaaacgttgatgattttcagaactttttgaattctgtactcagaagaagtttggatgaatacagagtctttttcgaaaactacgagagactgtttaattctttttcatcaaaaatctttagcatgagaacaaaatcccgccttgtagtcgggttgggtgatgagagtgtttacgaaacttcaataaggctccacagaaactatggcgtcccgtatatacccggctctgctttaaagggtgtggccaagcactacgcattcagcattcttgccagagaaaatggtgacgagatacttaggatttacgaaagcgtaaaggaagacttgaaggcgaggattgcaaagagagacaaaataaaaaagaatgacgttcccgaagattactatctaactgctgctgtaatccaagagctcttcgagaaaaaattcgacgagctcggagctatacggaacactcgcgttgagattggagatactgtgattagtgtaggagacatagtaaaaatcttcggaacccagaaagaggagggcagcgtgatatttttcgacgcattccctacgcctgagcaactaaaagataaaccaaatctcgaactcgacataatgaaccctcactatcagccatactaccagcatggggagcctccgggagactggcattcaccaaatccaatcttcttcttaacagtccctgccggcgttgaattcacctttgccgtggcttcaagagatttggatgatttagcggagaaagcagaaaaactgctcaaagaggctttgaagaaattcggagtaggggcaaagacgtcgctgggctacggcagatttgatgcgcgtgatgatagataa

SEQ ID NO: 491 - protein, 343 aa, Archaeoglobus fulgidus
MKSNVVVKYPVNSELANYAEKFWKKELAIYNLSLILNKMTPFVKRRSESYKSSLSAVKEIFKNVDDFQNFLNSVLRRSLDEYRVFFENYERLFNSFSSKIFSMRTKSRLVVGLGDESVYETSIRLHRNYGVPYIPGSALKGVAKHYAFSILARENGDEILRIYESVKEDLKARIAKRDKIKKNDVPEDYYLTAAVIQELFEKKFDELGAIRNTRVEIGDTVISVGDIVKIFGTQKEEGSVIFFDAFPTPEQLKDKPNLELDIMNPHYQPYYQHGEPPGDWHSPNPIFFLTVPAGVEFTFAVASRDLDDLAEKAEKLLKEALKKFGVGAKTSLGYGRFDARDDR

SEQ ID NO: 492 - DNA, 468 bp, Archaeoglobus fulgidus
gtggacataagggaaattgagcaggaacgggcaagtttcgcctttaaagtcgtgtcagatattaaagataaatacagtcagaacaaaaaagttcagggaaagtactcttcttatgctgaaaaggccccaacaataattctcaataatggtcttggggcaactcttgcgtttttcctttcaaaacttgaaaagccgattgatgatgtcgattacaaaagtataaacccggaaagctttggaaatgcagaaaacatcgcctatgcctttctttacaagcatctttcaacttggcttgcggaaggaaacggaaaagattctgcatttagtggtttaacaaacggagaggacccgctgaagtacataatggaaaaaacagcaatagacgtagctatttcaacagaggaggctctttcaattcttaattggattaaaaaatttgccaaggctatgctggaggaggaattatga

SEQ ID NO: 493 - protein, 155 aa, Archaeoglobus fulgidus
MDIREIEQERASFAFKVVSDIKDKYSQNKKVQGKYSSYAEKAPTIILNNGLGATLAFFLSKLEKPIDDVDYKSINPESFGNAENIAYAFLYKHLSTWLAEGNGKDSAFSGLTNGEDPLKYIMEKTAIDVAISTEEALSILNWIKKFAKAMLEEEL

SEQ ID NO: 494 - DNA, 1068 bp, Archaeoglobus fulgidus
gtgttcgacatgtttgaaaaagccgtggtttttggtttgtatagtataacacccgtgcatgcggggagcggggctgagctgagcgttatagatttgccgatacagagggaaaggcatacggggtttcccgttatatgggggcagagtttgaagggtgttttgcggagtcggtttagacaacttgaattagatgaaaaaattgaggtcgaaagccagaaatggaagtggaaagagaaaacaaaggaagttctaaaagaaaaggcggatgaattcattaaaaaagttgaagagagaaaaagagatcctctgcttacggagatcgttttcggtcccgcaacagatggagcatcagagcatgctggagctgtaagcgttggagacgctaaaattctcctatttccggtgaggagcgctaagggggtttttgcttttgtcacgagccccatagttatccaaaggcttaaggaagactttgagttagtttctgaaatcgaaaatgatattgagctaaagcaaattctttcaagatttaaagtggaactcagcaataatgaaacgattgctggcaatgccttaattctaaatggagaaaacaaggtaattttggaggacatcgtcttgaaagttaaatcagacagcaatgtaatagaaaatttagttgaagtcttaaaaacgctttttggagacaactttttcggaaaacctatagaatcaatcaaagaacgcattgcaatagtcagcgatgatgtattcaaatcattcacgagattctcaactgagattgttgcaagggttagaattgatgcagaaaaaggtacagttgctcggggtggactttggtacgaggaatttttgccgtcagacaccttaatgtactctctgattgctgtaggcagtccaaaaaaagagaatttgcccaaagaagtggacaacactcagaaaattgttaatgttttaaaagtaactttcaacaatgcatttctgcaaattgggggagatgaaactgttggaaaagggtttgtgaaagttagagcgggggtgttgaccggtggacataagggaaattga

SEQ ID NO: 495 - protein, 355 aa, Archaeoglobus fulgidus
MFDMFEKAVVFGLYSITPVHAGSGAELSVIDLPIQRERHTGFPVIWGQSLKGVLRSRFRQLELDEKIEVESQKWKWKEKTKEVLKEKADEFIKKVEERKRDPLLTEIVFGPATDGASEHAGAVSVGDAKILLFPVRSAKGVFAFVTSPIVIQRLKEDFELVSEIENDIELKQILSRFKVELSNNETIAGNALILNGENKVILEDIVLKVKSDSNVIENLVEVLKTLFGDNFFGKPIESIKERIAIVSDDVFKSFTRFSTEIVARVRIDAEKGTVARGGLWYEEFLPSDTLMYSLIAVGSPKKENLPKEVDNTQKIVNVLKVTFNNAFLQIGGDETVGKGFVKVRAGVLTGGHKGN

SEQ ID NO: 496 - DNA, 315 bp, Archaeoglobus fulgidus
atgaaattcgctgtgattgatcgcaagaacttcactttaattcactttgaaatcgaaaagccgataaaaccggaaattcttaaggaaatcgagatcccttctgtggatacgagaaaaggagttgtaatctctggaagaggtccaatatggctccactgctttttagcccacaagtaccatcacacgccctttgtggcagtatacgacccgagactcggagctgtggttgttcagtcccacagtgagctaagggaaggagatgttattgacgtggttgtggaggagatactgaaaggaggtgttcgacatgtttga

SEQ ID NO: 497 - protein, 104 aa, Archaeoglobus fulgidus
MKFAVIDRKNFTLIHFEIEKPIKPEILKEIEIPSVDTRKGVVISGRGPIWLHCFLAHKYHHTPFVAVYDPRLGAVVVQSHSELREGDVIDVVVEEILKGGVRHV

SEQ ID NO: 498 - DNA, 966 bp, Archaeoglobus fulgidus
atgggtgtgtatcacatctcaggtgtaggctttcgaccgggtgctgttactgtaccattgacggcagtgtacactcttcagattgctcaagctcttggaattgaagaggccaaagaatttttcaagtactcgagtgaggcggagaaaaagggcagttacgaaatgacaaaaggtatacctgaagtattggtggtatttacctcacgagatgtgattgaagggcgcaaaaagctggaatataagtccaattggttcagtctttcaggagggtctgaagagaaggtagaaaaaccaattgtgaagtatttgaagaaactatttagacacatcgaaaaaaattttaatttggaattctgtttaaagaaattctatcttgttaaagtagatcatcagaattttgatgattgctttgagaaaattggagtgatactcagagccttaaaagataaggaagtctggggtaacatgataggaggaacgaatcagattaatctggcaatgctcacagcaggcgcatacacggcaacgatctcaaagtattactatctgtttcagaatgatgtggctctgatggagccagagtggatagacaaaccgagtaacaaaaacataaggcaggcaacaatagagattctcaagaaatggcaggagttgccaatattcaacttggaaatgggtagcatcatgaaagatatttctaatttgtttggtggaagaggtttcgtgaacatcagggaggtggagcggattcttgagaattacgggctcggaaaacaatttttgacaaagttcaggggtagaatactggagtttgaagaagataaagtttctaagggtataatgtttgataaaattgtgaatctctggaatttgataagcgatgtggatgttagaaatgtattgagggagtggaaagatacgggtgtaattcgagaggtggatatcaatgaaattcgctgtgattga

SEQ ID NO: 499 - protein, 321 aa, Archaeoglobus fulgidus
MGVYHISGVGFRPGAVTVPLTAVYTLQIAQALGIEEAKEFFKYSSEAEKKGSYEMTKGIPEVLVVFTSRDVIEGRKKLEYKSNWFSLSGGSEEKVEKPIVKYLKKLFRHIEKNFNLEFCLKKFYLVKVDHQNFDDCFEKIGVILRALKDKEVWGNMIGGTNQINLAMLTAGAYTATISKYYYLFQNDVALMEPEWIDKPSNKNIRQATIEILKKWQELPIFNLEMGSIMKDISNLFGGRGFVNIREVERILENYGLGKQFLTKFRGRILEFEEDKVSKGIMFDKIVNLWNLISDVDVRNVLREWKDTGVIREVDINEIRCD

SEQ ID NO: 500 - DNA, 1026 bp, Archaeoglobus fulgidus
atgattttggtgatgaagccttatgattctttattattccgcgagccacggccttttgatgtaaacaatcatgtagcgcgcacaatattgccgttacctcaaacattggcaggggcggtgaggtctgcaatttacgtgaaatatggttcgaaagtgaaagatctaatagggtttggaaaagaggagcctgaatttgaaattctgggtcatttcttctacaggtacgatggtaagttcgaacttcttgtagaatcgccgcatgatgtgacccagaacctgggccttgtaaaaccacacaggattgacaaattgggtattacaatcctaatggattctgagggcattaaatttaggccattcaacggctttttaaagttcagcggtcttattgattaccttcagggaagaattgctgaggattctgtggtagaaaggcagaaaatttttaagaaagaacgtagagtaggaatagcacttacaaaggctaaggttacaaaggaagaacacttctaccaagtagaaatgctaaggttctccgacgactgcggtatagctgtttgggttgaagatggcgtcgattttgatgacgaggggattttaggagtcggtggtgagaggaggtttgttaagtttgaaaagagagaagagccggagtgtataaccaacctgaggagtaaatggaaaaagatcagagacaaaataaacgaaaccggaagattaaaaatctacctcgcaactccggcgatactgggagcaaaaggttattcatcaaaattagattatgatttgctcggtgatatcggaatagaacgtgtgaggagtgtgaatttcattggcggaaagccagtcattttcagcgggtgggattttgttaccagaaagcctaaaccaacaagatatgcggttccagcgggttccgtttattttgtagagtttgagggggaagtcaagttggatatgccttatctcaagctcggaaaactcacaaaactcggctacggtttgtgctttatgggggtgtggtaa

SEQ ID NO: 501 - protein, 341 aa, Archaeoglobus fulgidus
MILVMKPYDSLLFREPRPFDVNNHVARTILPLPQTLAGAVRSAIYVKYGSKVKDLIGFGKEEPEFEILGHFFYRYDGKFELLVESPHDVTQNLGLVKPHRIDKLGITILMDSEGIKFRPFNGFLKFSGLIDYLQGRIAEDSVVERQKIFKKERRVGIALTKAKVTKEEHFYQVEMLRFSDDCGIAVWVEDGVDFDDEGILGVGGERRFVKFEKREEPECITNLRSKWKKIRDKINETGRLKIYLATPAILGAKGYSSKLDYDLLGDIGIERVRSVNFIGGKPVIFSGWDFVTRKPKPTRYAVPAGSVYFVEFEGEVKLDMPYLKLGKLTKLGYGLCFMGVW

SEQ ID NO: 502 - DNA, 2946 bp, Archaeoglobus fulgidus
atggctgacaacgaattctggttaaacaaaattagggctttcttccatgaccctccagataagtcgtttgaacttaaaacgcatgaacgaagagcctcatttattcttggagaactaaaaccaagcaaatctctaaaaagaataataaaaaatgctgatatacaagcatcatccttacaaagagtagaccttgaaaagagtatccacaaaaaagaactgaaatcgacatttgacaggattcacaacacggaaaaatatgagtacataggccaaccaattataaggcaccccgtaaccggggagattaaggagtacggcacaattttagccaatcttcctcaaacacagagggaggtttacgacgttgatgatgagggcaaagaagattacgaggagcagtttcaagagatacttagcagaattcttaaaatagaaaagaaagtctttgatgactttaagaatagatacagtgacccaaaagacctctacatttcactatgggcattttacgccgagaagctaaaggaagccttggaggaggagttttcggcaagcttcgcagaggagttcgtgaatttacctgcatatactcttagcccggaccatacgctatttgaccatgcagacgccacttcggccattttcggtgctgaaattgacggaaaaaagcctgtgttggtgctttttaaaattagccccgttcagaagttcattgctgatgcgaggaaagaaaaagatctgtgggcagcgagccacatgctttcaactttaaccttcaaagcaatctcattcatcgctgataaattcggtccagatgtcgtgatatatcctcacttgaggggaaatccctttttccatgcttggttacattcaaagaaaatctgggagttttcagattctcacagccttaaaatagcgtctgttcccaataaattcctggcactcgtaggtgttagcgatgaaaaggagctaaacaatttaagagaaggcatcaggaacgaaattgagagcttcttggctgatttatttgacaaactctggaatgaggttattgttggggccttggaacacagtgacgctctaaaacatttaggtgacaaaaaagaaattcacaaagaaattttgctcaaacgtttcaccttaaccctgagctctcttaaaatccatgatgtagatgtttctgggagcaaagaggaagcttatgaaaaggtaaaagattttgtcagaagtcttggcttgccaaatgcaatagaaagtaaatatctgcaatggcttgatatgcttggtagtgtggaggcaagcaacaatcgaccaaccaaatacgacctttactctctttactacgaaatcctgactgtgttaaatgcgattgaatcgacgcatttcgacaaaccagccgaacccgcaggatacaaatgcacgctttgtggtgagcatctggccataggtggcgaaagccgggaaatgatggaaaatgtttgggggaaaattcataagcgatggccctcccaccttcgcagcaatgaacgtctatgtgctgtctgcgctgttaaaaggttctatccaaagttcattgagactctggatatttttgaaggggtaggtaaggtagttccggatattgaaagtgtaagcgaggttgcgatgtgcaggagaacaaagcatggtattacctggaaggaggtttatgattacctgagaggactaaaaaatgttgatgatgagaagttattgggtaaattggagaacttgaagcattctgttcagaccttaataaacaacgtcaaatccgagctcaaaagcagaaaggtatatccggaggagttcttggaggggctgaacaggaatttcagcaatgagattctgtactcagagcggttgcgagactttaatacactgctcgatacactcggtttcgacgctgctaaactcggtttagacgatgttaaaaattacgaaaccatgatttccgagttaagagaaagactatctgaagtatataagatgttgggagagcctccgaagtactatgccatactgatgatggatggggacgaaatggggaaattgctcagcggtgagaagcttaaaactgctgagcattatttacactcagccattttggagagagtaagtgatgcgttgagagtaaaagcaaaaacagttagaagactaatcactcctgcagcccactcttcgataagcagggcattgaaaaatttctcggtgaaccatgtcccagatgtagttagaaaaggcaacggaacgctcatttactcaggtggagatgacgttctcgttttgctacctgtagataccgcctttgatgttgctacagaattagcaatgaccttctcaacctcgtggaatggctgggaaatgttgccgggaaacaaactcagcgcaggtcttttaatagttcactataagcatccgctttacgatgcacttgaaaaaacacgggaactgcttcaaaaagctaaaaaactcggtagaaatgcaattgctgttggactgctgaaaaggagtggtagctactatgaaagtgttgttaacttcgaaacactggaagatgcaaaagcggttgccaatctgctggtaaaagagcaggtttctccccgaattatttatgaactcctgaatttcgcagatgtcatcagtaaagagtttctacaccagctcgttaaatatgaggcagttagacattctatagataaaaatttggctgaagagtttcagtcagtttttgccagaggtcatcagggagttagagttgagctggaaggtaatgacgaagaaatcaacaaatacataagtgatggggcaaacttagagacatttcttgataaatacgaaaaagcagtagatgtaatcagaaaacaggtgcggggattcttaaatcttgtaaaaatcttatatgagtcaattagaggtggagctaaatga

SEQ ID NO: 503 - protein, 981 aa, Archaeoglobus fulgidus
MADNEFWLNKIRAFFHDPPDKSFELKTHERRASFILGELKPSKSLKRIIKNADIQASSLQRVDLEKSIHKKELKSTFDRIHNTEKYEYIGQPIIRHPVTGEIKEYGTILANLPQTQREVYDVDDEGKEDYEEQFQEILSRILKIEKKVFDDFKNRYSDPKDLYISLWAFYAEKLKEALEEEFSASFAEEFVNLPAYTLSPDHTLFDHADATSAIFGAEIDGKKPVLVLFKISPVQKFIADARKEKDLWAASHMLSTLTFKAISFIADKFGPDVVIYPHLRGNPFFHAWLHSKKIWEFSDSHSLKIASVPNKFLALVGVSDEKELNNLREGIRNEIESFLADLFDKLWNEVIVGALEHSDALKHLGDKKEIHKEILLKRFTLTLSSLKIHDVDVSGSKEEAYEKVKDFVRSLGLPNAIESKYLQWLDMLGSVEASNNRPTKYDLYSLYYEILTVLNAIESTHFDKPAEPAGYKCTLCGEHLAIGGESREMMENVWGKIHKRWPSHLRSNERLCAVCAVKRFYPKFIETLDIFEGVGKVVPDIESVSEVAMCRRTKHGITWKEVYDYLRGLKNVDDEKLLGKLENLKHSVQTLINNVKSELKSRKVYPEEFLEGLNRNFSNEILYSERLRDFNTLLDTLGFDAAKLGLDDVKNYETMISELRERLSEVYKMLGEPPKYYAILMMDGDEMGKLLSGEKLKTAEHYLHSAILERVSDALRVKAKTVRRLITPAAHSSISRALKNFSVNHVPDVVRKGNGTLIYSGGDDVLVLLPVDTAFDVATELAMTFSTSWNGWEMLPGNKLSAGLLIVHYKHPLYDALEKTRELLQKAKKLGRNAIAVGLLKRSGSYYESVVNFETLEDAKAVANLLVKEQVSPRIIYELLNFADVISKEFLHQLVKYEAVRHSIDKNLAEEFQSVFARGHQGVRVELEGNDEEINKYISDGANLETFLDKYEKAVDVIRKQVRGFLNLVKILYESIRGGAK

SEQ ID NO: 504 - DNA, 990 bp, Archaeoglobus fulgidus
gtgtgcatgtacagtgctacctttactcttgaggctatcactcctgttttcatgcgcggtgctaatcagagcaaagccgaaatcagggctgcatcgattaaaggcttgatgaggtggtggttcagggctctgtccgggagctattttggcaatgatgttgaggggttgaggagggttgaggagtacgtttttggaagcacaaagcgggagagtagggtggtggttgaagttgtaaaagaacacgtggaagagaggttctgtccactaccaatggtttggaaaaagaagaaaggtgttacaacaagagtatctcaaagagcaatcgctcccggatcgaaattcacgctgcttttaacttcggatgatgaagaagttcttaagttagcctgctattctttaattgggttggtgtattttggtgggattggttttagatgctctcgtggagcggggtcactcaaaatttcaagtttaaaatccgatgtgcaactaatagatttgcctaaaaataaaaatcagttggggcagatggtgaatgatctcactgtagaaattgctaaaattctaaaaaagacgtttctttgtgatcatgaaaataaaaattgcacaagttattcttctttttggtgtttctacctgttcttgtggggggaaaaggctgaattggaagaggtatattatcggagcaacaatttagaaaatgagcggttaacccttcttgatttgtttgaaaaagaatttaagaacaaaaataaccacttgtctaactacggataccgtgattttgtttttggtttaccgagaggtacaaaaaaagacaggagagcatctcctattaaagtcgggataacagaactttccgaaaagtaccatgtaagggtgtcggtttttaagactaaaatattcaaaccgggaatgaatgtgaagtgggacaatattttcgtgtttctggaaaatatcggggcagagagaatttacccagagaggtga

SEQ ID NO: 505 - protein, 329 aa, Archaeoglobus fulgidus
MCMYSATFTLEAITPVFMRGANQSKAEIRAASIKGLMRWWFRALSGSYFGNDVEGLRRVEEYVFGSTKRESRVVVEVVKEHVEERFCPLPMVWKKKKGVTTRVSQRAIAPGSKFTLLLTSDDEEVLKLACYSLIGLVYFGGIGFRCSRGAGSLKISSLKSDVQLIDLPKNKNQLGQMVNDLTVEIAKILKKTFLCDHENKNCTSYSSFWCFYLFLWGEKAELEEVYYRSNNLENERLTLLDLFEKEFKNKNNHLSNYGYRDFVFGLPRGTKKDRRASPIKVGITELSEKYHVRVSVFKTKIFKPGMNVKWDNIFVFLENIGAERIYPER

SEQ ID NO: 506 - DNA, 642 bp, Archaeoglobus fulgidus
atgagaactgcactaatcgccacactcggctttgacgaaaaattctgttacagagccatactccggcacggaatcaaagaaggggacagagtaatccttataacgacgcagatggttgaaagagtggcaaaggcttacgagtggattcgaaagcttctggaaacttcctacggagacagggtggaggttgaagttctacaggttgagctgaagagtgttgaaaaagcaatcagagaggttgcggataaaatcaaagaggttgagggctatgatttggttgttgttaatatcagcggaggtatgagagttttggtcgtcatcgtgcttctcgcatgcatgttggggctgccagaaaacctgaaagttgagattgagaaagaagatttctctgatattgtggagctgcccgttggagttctgaaaatagtcaagtcaccgcttggtgatgataaagttgaagtccttaaggccgttatgaacgggctgagagacgtgagaggcttatccaagcacttgggcaaggatgagagcaccataaggaggcatcttgcagctcttgagaagatggggttgattgaggtgaagaagagaaagcccctgattgtgagtgcaaccgaactcgctgggttgattgtaccgtaa

SEQ ID NO: 507 - protein, 213 aa, Archaeoglobus fulgidus
MRTALIATLGFDEKFCYRAILRHGIKEGDRVILITTQMVERVAKAYEWIRKLLETSYGDRVEVEVLQVELKSVEKAIREVADKIKEVEGYDLVVVNISGGMRVLVVIVLLACMLGLPENLKVEIEKEDFSDIVELPVGVLKIVKSPLGDDKVEVLKAVMNGLRDVRGLSKHLGKDESTIRRHLAALEKMGLIEVKKRKPLIVSATELAGLIVP

SEQ ID NO: 508 - DNA, 351 bp, Archaeoglobus fulgidus
atgagttctaccatgagtttcgacaatttagcaaaggtccttgcagttctcgtcgcagagcagggaagctacacctacgttgacaagctcggatacgtgccctctaaggatttagcagttttttacctgaaggaggccttgagagacctccattccatccagcagaaggaaaaatttgaaaatgagaaggccagagaactggttggaaagattgactacgagagggtggagaaagagcttgaagatatagccaaaactgacgagaggaaggagctgagagagaagacctctctcatcgctgctaaggctcttgccctctcagcaaaattgggaggtggtagtggtgagtga

SEQ ID NO: 509 - protein, 116 aa, Archaeoglobus fulgidus
MSSTMSFDNLAKVLAVLVAEQGSYTYVDKLGYVPSKDLAVFYLKEALRDLHSIQQKEKFENEKARELVGKIDYERVEKELEDIAKTDERKELREKTSLIAAKALALSAKLGGGSGE

SEQ ID NO: 510 - DNA, 960 bp, Archaeoglobus fulgidus
gtggtagtggtgagtgacgttttcgtttcggtaagaggaagagttatgctcaatgtggaagcaatgaacatgactgagagcgttggaaattacgtgaagcacagaagagtgcccgtagttttgcctgacgcaaaatacacaacatactttgttcctgcaatcagtggtgaaagcattgcccatggctttcaggaggttcttgcagaggttggcaaaaagaatgggctgaaggtttgcaagctatgtgagaagggaattttccttaagagcaccaacgagaacgttttcaaggagtccttctcatcagacccgccaaaggacgatttcgagtttgaaaaaacagtaattgaaaattgcattgttgaggatgttggtggattcctttacgctcccagagcaggtggaaacgtaaaaagaacgtcaaacttctacaccggctacatgattcccgtaagggagtccatagagggagcagtaatagagcctcagcttcactcaaggtacgccctcggcactcccttcgttgagggagggcagggacagatgatttactacgtggagctttcttcagcggtttacactttcagctttgaccttgatacgaggtacattggaaggacgaccttcagctatgaaaaagctgggacagaggtggggaagaggagtgaaagaattaacgcagctcttgaagccctaaagaagtttctcatcgagttcgcctttggagcaaagaaaacgaggtttttgccagtaatggaatgggattccttagttgtggcagtttctgacgacgtgtggactgtcccaagcccctacactgcaggctacatagataacgcaaggaagaaaaaggagaaggttaacttcaacacgaagctctttgtttaccccgaaggtggaagctttgaagaggttgtggttgaggcgattgaggaggcgaaggagagagcgggcaaatga

SEQ ID NO: 511 - protein, 319 aa, Archaeoglobus fulgidus
MVVVSDVFVSVRGRVMLNVEAMNMTESVGNYVKHRRVPVVLPDAKYTTYFVPAISGESIAHGFQEVLAEVGKKNGLKVCKLCEKGIFLKSTNENVFKESFSSDPPKDDFEFEKTVIENCIVEDVGGFLYAPRAGGNVKRTSNFYTGYMIPVRESIEGAVIEPQLHSRYALGTPFVEGGQGQMIYYVELSSAVYTFSFDLDTRYIGRTTFSYEKAGTEVGKRSERINAALEALKKFLIEFAFGAKKTRFLPVMEWDSLVVAVSDDVWTVPSPYTAGYIDNARKKKEKVNFNTKLFVYPEGGSFEEVVVEAIEEAKERAGK

SEQ ID NO: 512 - DNA, 801 bp, Archaeoglobus fulgidus
atgattggctatctcgttgatgttgaattcgtctggggatttcaggcgaggattgctgggctgtcaaagacttccccatccttttactatccccctccaacaacctttctcggtgcagttgcagaggctattgcaaaggataagggcattggagagcagaggggaaaggagataatttcggagctcggagagaatctgcttgccataggctggaaggctttaaactgcactcccctgaggtattcagatattaacaggattctcgctgtcaaaatcacttcaggtgttctttaccccaatccccaagaccttgcaaagtccttcgactcccccgcaagagggaaaaccatcttatcctcgctaaacgatgaggctccaaaaataagatggttcctcgtattcaaagaggaagcagtagaggagaaaatcctgtggaaaatacacagaatcggctcgaaggagagcagagtggcggttgtggacgtcaaaaaggtgaaggtcacgcagaaggatggtcttatttcaacagattacagctttcccgcagaggacggtgtggaactcaggggaatcctgagccagagatgggagtttgaggtttatctgaatccttttgaggtgaagtattcagagaaggaaaaccccctaatgagctacatctctgggaagaaggcggtgctctacagaattcccattatgacctccatattttcaacgcccgaatgtttggtagaggtggggggcgacttcaaagcctacgaggctggcggagaggtggtgattggtagatgctcaaagtga

SEQ ID NO: 513 - protein, 266 aa, Archaeoglobus fulgidus
MIGYLVDVEFVWGFQARIAGLSKTSPSFYYPPPTTFLGAVAEAIAKDKGIGEQRGKEIISELGENLLAIGWKALNCTPLRYSDINRILAVKITSGVLYPNPQDLAKSFDSPARGKTILSSLNDEAPKIRWFLVFKEEAVEEKILWKIHRIGSKESRVAVVDVKKVKVTQKDGLISTDYSFPAEDGVELRGILSQRWEFEVYLNPFEVKYSEKENPLMSYISGKKAVLYRIPIMTSIFSTPECLVEVGGDFKAYEAGGEVVIGRCSK

SEQ ID NO: 514 - DNA, 1173 bp, Archaeoglobus fulgidus
atgctcaaagtgaaactctcgctgcctccagactcgacctttttaagccaactgatttacgaaagccttctttacctctctggaaaaaagcttgcaaagtttgaaaacggagagctcttgattgaatccatttcaaaggctcttgaaacttttgatgatgaaagagtgggcgaaattcggattgtaatgtctggaaatgataacattaacgccaaaatcttcgaaacttttgggataggtggggtaaaaagcagaaaaacctactacgacctcatcgctttacttaaggagcacagggataaaatctccaccaaagatgagtcggaaatccatctcaatataaagggaaaagacgttttcatggatataaacagcaaatccgacggtattgcggcaccacaactcctcaaagttgacagatacaccggcttctcctccctcgacaccccctacacctctcagcagctaaccttttacctctcaaaggaggttgctctcctcgcgctgctgggaatctactcctctttcgtgaccaacgtcaggcagcaacagcagagctactactacttccttttcttctccccggaagaggttgcagggctgctaaacagtccatccttagctgagaagtttttcttggtaaaagagagcgtaagggagagcctgcgagagcttttaaggaggacaacgtttaacgagcttttgctgattgagacaactctaaaccttgagctgcagaggctcatggagacagaaaatctggataagatctctttgacacttttcaagattgcccacgaaggtcaaacttacaagatttacgagcaaatacccataacagtttacagaaatccagctttttacgaaacagccaaaaagtacttcagagacccgttaaaattctctgagaagttgcgaaaagccattacacagggagtaattccctcagcccttgcaattctaagcaccaaaaacaagtacagcgaggctgacaacattctaaaagcaatccagatgctctacaggttcgtggttcttggcgacctgcagggatggtttggttttttgagggagctcaacaatgcacactcgaagctcaagaacagcagtgacggaagggagaagaaaagggcaggtcagtatctcaacattgtgaaagaggtagcatggtaa

SEQ ID NO: 515 - protein, 390 aa, Archaeoglobus fulgidus
MLKVKLSLPPDSTFLSQLIYESLLYLSGKKLAKFENGELLIESISKALETFDDERVGEIRIVMSGNDNINAKIFETFGIGGVKSRKTYYDLIALLKEHRDKISTKDESEIHLNIKGKDVFMDINSKSDGIAAPQLLKVDRYTGFSSLDTPYTSQQLTFYLSKEVALLALLGIYSSFVTNVRQQQQSYYYFLFFSPEEVAGLLNSPSLAEKFFLVKESVRESLRELLRRTTFNELLLIETTLNLELQRLMETENLDKISLTLFKIAHEGQTYKIYEQIPITVYRNPAFYETAKKYFRDPLKFSEKLRKAITQGVIPSALAILSTKNKYSEADNILKAIQMLYRFVVLGDLQGWFGFLRELNNAHSKLKNSSDGREKKRAGQYLNIVKEVAW

SEQ ID NO: 516 - DNA, 1641 bp, Archaeoglobus fulgidus
atggtaacgctatccgaaatctacggggagattgtggaaaaatggtttggaggcagagacgaaagacccttcatcgccaacgccatcagagaaattgaaaaaaactgggacaggaacatcttcgtcatagaagctccaacaggctacggaaagtccacgatttctgccactattgctgcatactctttacaagaggagcttaaatcaataatagctttcccgctcagaacgctccttgaggaccagtataacaagtttaagggcctgtttggcaacaaattaggaaagaggtacatgcacaaccccgactccccttacctgattaagcccgtcaccctaacaaccatcgacacccttgccctgacactcttcggcattcctccagaagaccttgataaggcggtaaaatactgggatggcacatcttcgggctctctcggccattatcttttttctcaggcctcggtggctttatccaacatcgttcttgatgaggtgcatcttctcgcagactcaaccaaatctctcaatttcctctttgccctcatgcatgctgcgattgataatgaccagaagctcgtcctgatgtccgcaacaatacccgaagcgctaaagaaaagaataaaggagtttaatcccgatgtgtgtatggtagagtttaatgagtcgttcgacagaaaattcgttgaagaaagaagaaagaaaaaataccgtattaatttgattgctctggcatcggttgagaagtttggaagtctggagaggatcctgctggaaggatcgaagaagttctcaaaaatcacagtggtttttaacacaattggcgatgctgtttacttttacaacaatataaaggaaaagattcccgagtttaaaaagctcctccttcattcaagattcagcgaaatggatagggagaaaaaggctgagctgctcgcagagatgaaaaaatcggaaaaatttgtaatcgtgacaactcaggtgatagaggcgggagtggacatctcatccaacttattcataacagaaattgctcctgccagctctttaatccagcgcctcggaagatttctgaggtatggggaaagggagggggaagtttacatctggtatgaggtggatgacagaggagagcttgctcgctggaaagatgacaggtacaaggtttacgactacagtcttaccgctctaacgcttgaaaaactcgcagagatgaaaaacttcagcgtgcacgttgattacgacagattgcttgacgtgtatggggaatttgaggttgacgaaaggggcgtgaatgatttgagaaggatactgatgaacttcgaaaacatcaattcagcggttgaaaaattctttgagctggaaggtagcttcgtcagagactcgtttataataccagtagttccttacagcgttattgaggaaaaaagaaggtcctcgaaggttccagtatcctttgaaactttcaagaacttcaaggtttatggctgcatagtttcagatgaattcgttagcgctgaaaagttaaaatgcaatctcagctcccccaaagcccttctcagagacatgattaggaagtcaatagccgcatttgttgttgacggagattatgacagcgagatggggctggtgaaaagatga

SEQ ID NO: 517 - protein, 546 aa, Archaeoglobus fulgidus
MVTLSEIYGEIVEKWFGGRDERPFIANAIREIEKNWDRNIFVIEAPTGYGKSTISATIAAYSLQEELKSIIAFPLRTLLEDQYNKFKGLFGNKLGKRYMHNPDSPYLIKPVTLTTIDTLALTLFGIPPEDLDKAVKYWDGTSSGSLGHYLFSQASVALSNIVLDEVHLLADSTKSLNFLFALMHAAIDNDQKLVLMSATIPEALKKRIKEFNPDVCMVEFNESFDRKFVEERRKKKYRINLIALASVEKFGSLERILLEGSKKFSKITVVFNTIGDAVYFYNNIKEKIPEFKKLLLHSRFSEMDREKKAELLAEMKKSEKFVIVTTQVIEAGVDISSNLFITEIAPASSLIQRLGRFLRYGEREGEVYIWYEVDDRGELARWKDDRYKVYDYSLTALTLEKLAEMKNFSVHVDYDRLLDVYGEFEVDERGVNDLRRILMNFENINSAVEKFFELEGSFVRDSFIIPVVPYSVIEEKRRSSKVPVSFETFKNFKVYGCIVSDEFVSAEKLKCNLSSPKALLRDMIRKSIAAFVVDGDYDSEMGLVKR

SEQ ID NO: 518 - DNA, 726 bp, Archaeoglobus fulgidus
atgaggatatacagcttctacaatgagaatgccagaagggagacgcttgaggagcatgtagctactgccctcaaactgctggactcggcagagaactcaaagctggtaaaatacggaaaaaagctaagccccgaatttgagagggcggtgaagcttgccattattttccacgatacggggaaggttttctttcagattaaaaagggatatggatacatgagcttcagagggcatgagtatttctccacctacattttcgacgttttcgcccgcagattaatcaaaagcgaaattgagaactacgaagctctttctgaactcagaaaaatctgcaatttttcaatcttcttccatcaccacgctatgaacattcggatgagggagccagaggcaggaagtaacataaaagcagggttaaagcttctcgatgttctctacagcgaagttaagcgttttctggaggataaagagaagaaagctttgaaggcggctttggaggaagtaaaagaaaaaggaaccgcaaatttaacaggatacgttaaaggcgaaatagtaagagaggtgtggagaaatgcgatggacagcagcaaattgaagaggctttgctacctgaaccttctcgttttaatcgccgcagattacagctcagcagctttgaacagaggaggtaacaaaacacccttcggaagagtggtggaggagttcagcgagttctatttaaagtag

SEQ ID NO: 519 - protein, 241 aa, Archaeoglobus fulgidus
MRIYSFYNENARRETLEEHVATALKLLDSAENSKLVKYGKKLSPEFERAVKLAIIFHDTGKVFFQIKKGYGYMSFRGHEYFSTYIFDVFARRLIKSEIENYEALSELRKICNFSIFFHHHAMNIRMREPEAGSNIKAGLKLLDVLYSEVKRFLEDKEKKALKAALEEVKEKGTANLTGYVKGEIVREVWRNAMDSSKLKRLCYLNLLVLIAADYSSAALNRGGNKTPFGRVVEEFSEFYLK

SEQ ID NO: 520 - DNA, 285 bp, Archaeoglobus fulgidus
atgctccacctcgtcgtttacgacataagcgatgatggcagtagggcaaggctggcaaagctcctcgaaaagtttggattgcagagggtgcagtattcagccttccgtggagagctgaatcccaacgacagagaggttctggcgaggcaggtgggaaaatttgtgagggatgatagggactgcatcttcatcatccctctctgccagcgctgctcctccaccgcaattgtaatcagcaacacgggagttgagcttgtaaaggagaagggagtggagttcgtttaa

SEQ ID NO: 521 - protein, 94 aa, Archaeoglobus fulgidus
MLHLVVYDISDDGSRARLAKLLEKFGLQRVQYSAFRGELNPNDREVLARQVGKFVRDDRDCIFIIPLCQRCSSTAIVISNTGVELVKEKGVEFV

SEQ ID NO: 522 - DNA, 570 bp, Archaeoglobus fulgidus
atgaggggtttgttcagaagtggtaaaatggatgttagcgacatagttcagtatctttattgcccgaggaagctttattttttaaaaatagcagggataaggatttctaagccgaaaatggaggagggaaaggctgcgcaggaagaggcgaggggaaagctgaggagctttgccagaaagttgaaaggagagcttttaacgtcggtttatcttgagagcaaaagatatgggctgaagggtgtgctcgacgctcttgtgattgttgatggaggggcctttcccgttgacgtgaagctgacgagatttcagtccatcacctacgcatggaagatgcagctaactgcctacgccctgcttgttgaggagaactacgcagttgaggtgaggaagggttatctctttcttctcaatcagggaaaatttgtggaggtcagcatatctcctgatgacaggaaagcacttttaaggataataaaggaaatagagaggctgattgaggaagaaaagtatcccagaacgtccaaatcgaaaaagtgcggttactgcgaagttagggagttctgcgtttag

SEQ ID NO: 523 - protein, 189 aa, Archaeoglobus fulgidus
MRGLFRSGKMDVSDIVQYLYCPRKLYFLKIAGIRISKPKMEEGKAAQEEARGKLRSFARKLKGELLTSVYLESKRYGLKGVLDALVIVDGGAFPVDVKLTRFQSITYAWKMQLTAYALLVEENYAVEVRKGYLFLLNQGKFVEVSISPDDRKALLRIIKEIERLIEEEKYPRTSKSKKCGYCEVREFCV

SEQ ID NO: 524 - DNA, 1038 bp, Archaeoglobus fulgidus
atgaggctcgttgtcgatggctttggaaagtatcttggaattgaaaacgggctgattgtcgttaaggagaagggcaaggcattgaggaaagtcagacctgaggacctgaagcaggttctgattatcgggaaagcagcaataagcagcgatgctatcaagctattgctcaaaaatcgagtggacgtggtttttctcgatttcaatggcgaaattctcggaaggctgagccatcctctgattggcacagcaaaaacgagaagagagcagtatcttgcatacggcgataaaagaggagttcatctggcgaaggagttcatcaaagcaaagatggccaaccaaatggccattcttacaaatcttgctaaggcaaggaaagattcgaatccggaagtagctgaatcgctcctgaaggctaagaaggaaatagatgcttgtctgaacgaactggatggcgtggaggcagagatgatcgacaaagtgagggaaagattgctcggaattgagggtaaagcttcgaaacattactgggatgctatatctctcgttattccggaggagtatcggtttaacggaaggagagggattgaaatcggaagtccgagatatgccaaggatattgtgaacgctatgctcaactacggctattctatactgcttgccgaatgtgtcaaggctgttgagcttgcgggtcttgatccttatgcaggttttcttcatgtggacgtctcaggaagaagctccctcgccatagacttaatggagaacttcaggcagcaggttgttgacagagtggtgctgaggctcatttcttacaggcagattaagcccgaggactgcgagaagagaaatatggtctgccagctgagcgataatgcgaggagacttctattagcaagtctgcttgaaagattggactcaaaaacgcaatacaggggtagaaaccttgcatactcctccattatcctcctgcacgccagagatgttgttgcttttctaagaggagagaggaggtatgaggggtttgttcagaagtggtaa

SEQ ID NO: 525 - protein, 345 aa, Archaeoglobus fulgidus
MRLVVDGFGKYLGIENGLIVVKEKGKALRKVRPEDLKQVLIIGKAAISSDAIKLLLKNRVDVVFLDFNGEILGRLSHPLIGTAKTRREQYLAYGDKRGVHLAKEFIKAKMANQMAILTNLAKARKDSNPEVAESLLKAKKEIDACLNELDGVEAEMIDKVRERLLGIEGKASKHYWDAISLVIPEEYRFNGRRGIEIGSPRYAKDIVNAMLNYGYSILLAECVKAVELAGLDPYAGFLHVDVSGRSSLAIDLMENFRQQVVDRVVLRLISYRQIKPEDCEKRNMVCQLSDNARRLLLASLLERLDSKTQYRGRNLAYSSIILLHARDVVAFLRGERRYEGFVQKW

SEQ ID NO: 526 - DNA, 846 bp, Archaeoglobus fulgidus
atggtttactttcttaacgagctggagcataagtttctcacccttgagctaaggccaagaatcaggcagaatcccgttcctgaggagctcagagggtggaactggcattctcctccgctcaagccctactacaatgttaagctccccatgtacctcatctgcagcagatactgccctacgtcgagggatgtttatctcacaatggttgagaaggtgaggggagaggagagctttcctgtttctctcggtaaagccattcacgaagctgttgcaaaagctataagagaggcgaagagtaagaatttctctgcagagcctccgaattacgataacgagatgattaatgttgcagttaaagcagtatgggaatacaccatgtccctgtgccaatcatcctacctcaaggtcaggtctgaacaaccctacgccaccgaagagggcgttcttctcacgtccatgccttttctcgttgagcacagaatggatggctcccttctcggctgcagcgggctgatatcagttgattgctacgactatctcagaaacgtcgttttcgatttgaaagttggggagttcaatgaagaaatgaggctctacaccaccggctacgctctcgttctcgaaagcattcacgagattcctgttgatgtgggctgtataatctccatcacattcaacggtgagagaatgagagtcagcaaggacctccattacatcgacgcaaatctgagaagctggtggattgaggagagggacagaaaggctgaaatcgtttttaatgaggctgatccgggagtggcgaagagctgcagcagtaactgcctgtttaatgccttttgcctatga

SEQ ID NO: 527 - protein, 281 aa, Archaeoglobus fulgidus
MVYFLNELEHKFLTLELRPRIRQNPVPEELRGWNWHSPPLKPYYNVKLPMYLICSRYCPTSRDVYLTMVEKVRGEESFPVSLGKAIHEAVAKAIREAKSKNFSAEPPNYDNEMINVAVKAVWEYTMSLCQSSYLKVRSEQPYATEEGVLLTSMPFLVEHRMDGSLLGCSGLISVDCYDYLRNVVFDLKVGEFNEEMRLYTTGYALVLESIHEIPVDVGCIISITFNGERMRVSKDLHYIDANLRSWWIEERDRKAEIVFNEADPGVAKSCSSNCLFNAFCL

SEQ ID NO: 528 - DNA, 25 bp, Caldivirga maquilingensis
gaaaatcccaaaagggattagaaag

SEQ ID NO: 529 - DNA, 897 bp, Caldivirga maquilingensis
gtgaagttagcggttctaagcaccgtaggtacaagcatactatctaacatggaagctactataagaaatgacatagaaaggggtgtgagtaccatagacctcacggggattcctgaagagatacaggcaaagttaaaggagggaaaactgagtaaactaggccctgatgatccgcttcaggagaagattgaacacatgaggcataggggtgattcgtttttcgagaagactatagagttcgtgaggaataacccagaggggactagtgcagagttaaatacattgataaggtttctcctggatttcccatacaggcagtttgaggagttggagatttacctataccccacggatacaggcacggggaaattctgcgcacaggtaatcaaggagtacctagaccgttacggaaatgaattcatgcagaaggctggaatcaacattaaacctaaggttgatgaaccaatagtcgtaaaggatcttggaagagacataaactggtttaacgaaggattaatagaactagtgaataaattcgccagactaataataaacaaaacacgtagtgggtacaaggtagtagtcaatgccacagcaggctataaaccagaaacagcgtatatagccctagtagcccaattaaccggtgcttggaaaataatctacatgcatgaatcattcaaaagcatagtggaattaccgaaactaccactaacaatacaggaaaaatacatagaggcattaaaaataataggcaacggaacactgcaaaacatcttaaagcaaatgggaatagacgtaaacgacctaatagaaagaggtctagtaactaacgaagaaggcatcataaaacccagagaatggatccagaaactaataaacacactacaatcataa

SEQ ID NO: 530 - protein, 298 aa, Caldivirga maquilingensis
MKLAVLSTVGTSILSNMEATIRNDIERGVSTIDLTGIPEEIQAKLKEGKLSKLGPDDPLQEKIEHMRHRGDSFFEKTIEFVRNNPEGTSAELNTLIRFLLDFPYRQFEELEIYLYPTDTGTGKFCAQVIKEYLDRYGNEFMQKAGINIKPKVDEPIVVKDLGRDINWFNEGLIELVNKFARLIINKTRSGYKVVVNATAGYKPETAYIALVAQLTGAWKIIYMHESFKSIVELPKLPLTIQEKYIEALKIIGNGTLQNILKQMGIDVNDLIERGLVTNEEGIIKPREWIQKLINTLQS

SEQ ID NO: 531 - DNA, 1689 bp, Caldivirga maquilingensis
atgagtagtggagattccgaggaaagagtcttagtactggcaccttggggtttacccactctttgggatgaagttaattacgtaatccccagggttagtgagagtggtgggaaattatgcgttaggcccattaatattgagtggaatgatgtggataaagttaagagttatacttcattggctggagtcctacgttacatcactaatgctggccataaaggctttattgacgtgataatcatgggcttggatacattggcattcccagatacgcgtagtcaaagtggaaactgcaacgtagtggggattcttagtgattttaccaatactctacgtaatggtaaagttaactaccgtgatattgagaacacagcttattcactccttaagaattgtatttctcaataccttggtggtttcaatagtaaagctgataaaatcaatattgaggtcgagatactgcccggtacaggaacctacagagccggtaactttaatgcaaggtttatgggcggcatcaacaatctgaacttcaccatgctatataagctatacaataaggttagatacaataagtacagtgccattattatcgacataacacatggtgtgaattacttacccatgataacgtacatggctgctcagttaatagccaagtacctgagtgccagggataataaggatatatgcttaataacctttaatgcagacccaatctcaagacaaaaaacagaagccacacaggagcgaagactcaacataatcgagatgcaaaacataagtattgaacctcatgaattcctcaaagagttaactggtaggttaaataaggagaagatctttagaattgtgagaactaatcatgataaggataagataaacaaattaaataagttgaataataattatgaagatatacgacgccgcttaaatccatcgaggattaccacatctcttgagtatggttttgcactttacctagttacttatctacgcaaaaataacctaacacatgtgaaggatctggaggagttatcaaggaatatttcgaatttatgcgatgaaatttacaactatatgaatgaggcagttgatattagtattaataataatgaggttctcatttcgaggatttacgattttgagacttcaccgctgttattatccatggcttttgacgtggtgagaaacagggtcattaacgtattgaaccttgatcaattaatggataatgagggtggtatagatattgaatatctattgaagataccggttagcagtgtagctgacacaatacttagtaatgaggttgattcaattaagcgtgcagctgagttatttagggatgttgctgttaacttactgggtatgaataaaggaatcctgggtggttatgtgaaatacggaaatatccatgattttgtgaataaatccatcatagacatagggcgtaggtctaatgatattcgtgaggagattaagaattattcatgcgataaccaagattcacatgatgattccgagtgtaggttcaacgataggaattttattgctcatgctggtcttgagagaaatatcacatgtattaaaatcagtggcgataaagtattcattaagtatattgataagtgcttcgaagatattgataagcacatggagaatattagtaagggtaatgccaagtag

SEQ ID NO: 532 - protein, 562 aa, Caldivirga maquilingensis
MSSGDSEERVLVLAPWGLPTLWDEVNYVIPRVSESGGKLCVRPINIEWNDVDKVKSYTSLAGVLRYITNAGHKGFIDVIIMGLDTLAFPDTRSQSGNCNVVGILSDFTNTLRNGKVNYRDIENTAYSLLKNCISQYLGGFNSKADKINIEVEILPGTGTYRAGNFNARFMGGINNLNFTMLYKLYNKVRYNKYSAIIIDITHGVNYLPMITYMAAQLIAKYLSARDNKDICLITFNADPISRQKTEATQERRLNIIEMQNISIEPHEFLKELTGRLNKEKIFRIVRTNHDKDKINKLNKLNNNYEDIRRRLNPSRITTSLEYGFALYLVTYLRKNNLTHVKDLEELSRNISNLCDEIYNYMNEAVDISINNNEVLISRIYDFETSPLLLSMAFDVVRNRVINVLNLDQLMDNEGGIDIEYLLKIPVSSVADTILSNEVDSIKRAAELFRDVAVNLLGMNKGILGGYVKYGNIHDFVNKSIIDIGRRSNDIREEIKNYSCDNQDSHDDSECRFNDRNFIAHAGLERNITCIKISGDKVFIKYIDKCFEDIDKHMENISKGNAK

SEQ ID NO: 533 - DNA, 1074 bp, Caldivirga maquilingensis
atgcgtgagatctttgagttagcctcttcattgagtaggttaatgagtattgttggtgaattagctagcccagagcctattgatttaagtgaaataggtggttttgaggttggttgcgatacggattttacagttggtgagttgaagcctgtgagtattgattaccctttaatggggcttgatagtcattcaaggattattaggttcttaggtgttgatgtccacttggttactggtgccttggttggtggtgataacgtgttgattcctcaacctaatggtactaataatgttagatggatcggccttaagcttagatttaagccccgtgactatgaattgcttgataagcttagtgaaatgttttacattaagtcttcgttccttgacaatgagtatttcgtgggttcttataatgatgaggctgttagggatgaggttaggaatcatgttgaggtaaccctcatgagggctgtcaacaataatgcattcctactggtggatgggcctgttttccccacgcctagggttctatccatggagggtaataagtatgcatctgtttttaatggtattattgagtctagggttaaggctcttaatgggcttaaggcagtgggtgttgttaagaggattgagcatagtcacttccttgcaaggtatcttagagagtgcggtagggagggtgtacccatggttgatgattacacactagccattaagagagcaaccttggctttacctaactcacggtctgtttacctaggccccattgtggttaaggttggtaactgggttaagtactgctggtacgtggttactaggactggtcgtaatgcctctgttgttcgtgtggaggggttgagcgaagaggttgccaaggagggtagggattacgtgggcatgctaatgacgttaagcggtaccgcggtacctatacatattgctgataaactggctaggagattgaacgccagcgcagtactaatgctctacaacctaagccccggcggcatcatcacctacgagggccttgaggaggttgagagggctaggggtgaccttgttgagtaa

SEQ ID NO: 534 - protein, 357 aa, Caldivirga maquilingensis
MREIFELASSLSRLMSIVGELASPEPIDLSEIGGFEVGCDTDFTVGELKPVSIDYPLMGLDSHSRIIRFLGVDVHLVTGALVGGDNVLIPQPNGTNNVRWIGLKLRFKPRDYELLDKLSEMFYIKSSFLDNEYFVGSYNDEAVRDEVRNHVEVTLMRAVNNNAFLLVDGPVFPTPRVLSMEGNKYASVFNGIIESRVKALNGLKAVGVVKRIEHSHFLARYLRECGREGVPMVDDYTLAIKRATLALPNSRSVYLGPIVVKVGNWVKYCWYVVTRTGRNASVVRVEGLSEEVAKEGRDYVGMLMTLSGTAVPIHIADKLARRLNASAVLMLYNLSPGGIITYEGLEEVERARGDLVE

SEQ ID NO: 535 - DNA, 1788 bp, Caldivirga maquilingensis
gtgaccttgttgagtaaccttgattgtaatgagtaccttggattcataactaggcagatgcccagttccgtgagtactgatgaggcattggcatacatggtcagtgggtgtgatgtcggtttcccagtgggtaggtacgtggttattgaggatgatggggttaagtacctggctaagattgtgcagtctagggtcgaggatatatactccatagccaagacaccggtaatctccctggaacaggagttaagtatggaagtacgctacataccaaggttcatagccctggagttgattagagaatgtaggggagatgcctgcagcccagtaaccactccaccacagatacatgctaaggttaggtgggcgagggatggtgaagtatcgaaaatgctctcactaccgagcaatggcgtggaactagggtacctggcactaccctccggtgaagtgctgaggagtgaattcgtgaaaatacccatagacgcccttaagcaccatgtacttgtggtcggcaccacaggtagcggtaagactcagctccttaagaacatggccctggacctagttaggaattacagtgactgcgtggtgattgcaatggatgccgtgggtcattaccaccacttggcgatggataatgttgaaaccagggttgtaataccaatgaccaattcattggtgggtcggttattgaggaatataaaggtaagtgaagccaaggaattagctagggagtttgcacgtaggcttgtaaggtactacctaaatgaattctacatacgtagtggattaaaaataagcggtaaggtgaacataaaggttgcctacagtagggaacaagaagacgccgggaaggataagggttacgtggtgaaggtgagtaaagtgattgttaaggctaagattaacattaataataatgataaggaaataaacgtgacgctactaccttgggctctaaaatccattgatgtaatgtacaggatcaatgacataacaggcttactcacggagcaggctaaattgttctacagaagggtcattaatgaagtcaccgatgaattacctagtaatgaaaagcccacgtttaaggagatttacgagtatttaataagcccaagcaaccagagtgaaaggggtaggacactggttaattatgaggctatagccaataaattaggcattcacccaagtaccttagagaacatagtaagggccatattatccctagtggagacaaggctctttgacgtggagcacaaggccggtgaccacaagctggtggttaaggaacctaattacagggaattatttaagcagggttatgtggttgtggatttgaggaccacatcaagcctcaaccagaggattatagtctacaggatcttgaataaattattcagagccatgaagccgggtggtaaaaggattgctgtggttcttgttgatgaggcgcacttattcttcccacagaccagggatgagacggagaagaggataattgagaatcagttaaccaggattgccaggctcggtagaagccgcggcatagccgtagtattcgccacgcatatgccggatgacttaaacgacgcagtactacaattaacaaacactaaggtaatcctcaggagtgacgagagggtccttgagaaactcggcatacccaccagtgagaggagattcctcacagtgactgatgcaggcattggttacgtgaagtcctacgcaatgaagtacccaatctacattaagttcgagccgaaggccttccacctcgggtaa

SEQ ID NO: 536 - protein, 595 aa, Caldivirga maquilingensis
MTLLSNLDCNEYLGFITRQMPSSVSTDEALAYMVSGCDVGFPVGRYVVIEDDGVKYLAKIVQSRVEDIYSIAKTPVISLEQELSMEVRYIPRFIALELIRECRGDACSPVTTPPQIHAKVRWARDGEVSKMLSLPSNGVELGYLALPSGEVLRSEFVKIPIDALKHHVLVVGTTGSGKTQLLKNMALDLVRNYSDCVVIAMDAVGHYHHLAMDNVETRVVIPMTNSLVGRLLRNIKVSEAKELAREFARRLVRYYLNEFYIRSGLKISGKVNIKVAYSREQEDAGKDKGYVVKVSKVIVKAKININNNDKEINVTLLPWALKSIDVMYRINDITGLLTEQAKLFYRRVINEVTDELPSNEKPTFKEIYEYLISPSNQSERGRTLVNYEAIANKLGIHPSTLENIVRAILSLVETRLFDVEHKAGDHKLVVKEPNYRELFKQGYVVVDLRTTSSLNQRIIVYRILNKLFRAMKPGGKRIAVVLVDEAHLFFPQTRDETEKRIIENQLTRIARLGRSRGIAVVFATHMPDDLNDAVLQLTNTKVILRSDERVLEKLGIPTSERRFLTVTDAGIGYVKSYAMKYPIYIKFEPKAFHLG

SEQ ID NO: 537 - DNA, 741 bp, Caldivirga maquilingensis
atgggttattttcttggtattactgtgggggtttcgttgttgaggaatgcgttgagtagtgatgctcttggggattactctggggttgtgggtcgtgttcttcagggttctgaggattctgcctacgtgttgtttaatgatgatttcgtcagcaggttatcagactttgcctgcggtaatcctaggtgttgtgctgaggcttcactgatctggtccatgcttgagaaggggtttaagcccttgacgcttgaattctttagcactgatactaatgccgctgagttgtgcactatggctcttgctagatgcttctctaggcatgtgaatgttgcgggttacgttagggttaggttcttcggtggtggtgacttgatgaggggttttgtaaaccttgtggatgcccttggtagggagttgagtaattacttgatgcgtggcttcgaggttttcataggtattagtggtggtatgaagattgaggttgtggcctctgtgcttgtggcttcaatactgggtgctagattggtttatgtaagtgagagcggtgagttggttattttaccgaggttaccattgagccttaggcgtgaggtccttgagggtgacttggcgtccctgcccggggatttgcttgagtcgctggaatccttaggtctcctgaggcgtggtgcctccggtcttgagtttcccaggtggcttctggattttacccgaggtggaaggccttcggctcgaacttaa

SEQ ID NO: 538 - protein, 246 aa, Caldivirga maquilingensis
MGYFLGITVGVSLLRNALSSDALGDYSGVVGRVLQGSEDSAYVLFNDDFVSRLSDFACGNPRCCAEASLIWSMLEKGFKPLTLEFFSTDTNAAELCTMALARCFSRHVNVAGYVRVRFFGGGDLMRGFVNLVDALGRELSNYLMRGFEVFIGISGGMKIEVVASVLVASILGARLVYVSESGELVILPRLPLSLRREVLEGDLASLPGDLLESLESLGLLRRGASGLEFPRWLLDFTRGGRPSART

SEQ ID NO: 539 - DNA, 849 bp, Caldivirga maquilingensis
atggcctcagtaactggagggaaaactgcactggatactggcacgaacgtggttagttacgtaaggcgtgagttcctgaacttcacgaaggacttaatgggcaaggcagggaggggaggtgagcgggaggttgtgggtatatctgaatttgctagggatgccatgaggagtatcgctgatgcctataaatgcagtaccatcaaggatttactagataaagcgaataagtaccttgacgaacaggtaaacgcactaaaggatctcggttatgaaatagtaatcaacaacatattcataacactaactaggttagccattgggcttaggaacccttacttcgagattctcgaacaaggcatctcctgggatccaataatgaacttgccctatatacccgcaagctccctaaagggtgccatgagagcctcagctgaagggacgcaatgctcacaggctttcggcagtatggacgaggcctcacacgtaattgtcctggactcatacccagtttactgcccctctgggaaatcattaatgacgcttgatattataaacccacactacgctgaacccgcgagaaccattgccgagccccaggtgaagcctgtacctgtaccgttcctcacagtgtccactggcgtgggttttagggttattataatggctgagaggaggaggttaaagtatagatgcagaaatgagcctggggattacatctacctatcgagtgattgcaagggtgtttgtacgattaatgatttgcagagtatagtaactaaagtgtttagtaggggtattggtgctaagacggcgcttggctatggaatattggagcagcaaagacattaa

SEQ ID NO: 540 - protein, 282 aa, Caldivirga maquilingensis
MASVTGGKTALDTGTNVVSYVRREFLNFTKDLMGKAGRGGEREVVGISEFARDAMRSIADAYKCSTIKDLLDKANKYLDEQVNALKDLGYEIVINNIFITLTRLAIGLRNPYFEILEQGISWDPIMNLPYIPASSLKGAMRASAEGTQCSQAFGSMDEASHVIVLDSYPVYCPSGKSLMTLDIINPHYAEPARTIAEPQVKPVPVPFLTVSTGVGFRVIIMAERRRLKYRCRNEPGDYIYLSSDCKGVCTINDLQSIVTKVFSRGIGAKTALGYGILEQQRH

SEQ ID NO: 541 - DNA, 1236 bp, Caldivirga maquilingensis
atgacatatgcagagcttaccctcaggttggtgacgccattattcacaggctccgcggaccccaatagtgtcgattatgattggcccctgaggcccagtgaggttaagggtgtttggcgttggtgggccaggacgtttgtgagtggtgctctatacgaggcaggtcagctccatggccatccggataaggacattattaaagtgccgaagaaagacgaggctaagaaggtctcgaaaatcgtgggcgagaagttgggacttggttatgctggtgaggagagcgtggcctctcaccttaagttgataatcaggcatgggcaaaacattaggatcaataaggcatgtagcaaccgcgtaagtggtaaggtactccaaaggattggcttactaacccttgactgtagaacgctacaatatgtggaacccagcgctgaattctacgtaaccattgataaacataataatgtgaaattaaatgatgataatgccattaaggcatcccttagtgttttatccatagccttgaccctctcatgcttcggtaagggtggtaggagggggcttgggtgccttgatgtagataaggttgatggtgactatagttttctctttaaccttaaccataaagaatttgctaagaagttgaattatacaatagagcttgtaaaagacatagttaaagagatgagcaagagtggtcttgaatcctgcgagttaccaccaatgcctgtagttagtaatgtggaattaacaaaatgtgttgatgtgaaagtgaaaaatagatatgtcgataggttgtttgtgtttcagttatttgaggtttacggcagggatttactacctaagttgcataacttcttcctaagacccgaaagggctaaaatactcatgggaaaccccaaagcaaaggacgaacttagaaacgagtttatggcctggatactgggcctacccagggagcagaaggggaccgggtataggttaatgtcaaataatatagttaggagggcttcatcaatgctcctctcgatccatggcattaataatgatgttgcttacctggcattgttcttatcggctgattggcccagcggattaacctggcacggcgctggctcaaaaccaattactattaatgagcgtgacataataaatgcgagttacgtagcattaaacgaattcctagaatatctgggtagacagagaataaggtggaagcgcgtatggcctcagtaa

SEQ ID NO: 542 - protein, 411 aa, Caldivirga maquilingensis
MTYAELTLRLVTPLFTGSADPNSVDYDWPLRPSEVKGVWRWWARTFVSGALYEAGQLHGHPDKDIIKVPKKDEAKKVSKIVGEKLGLGYAGEESVASHLKLIIRHGQNIRINKACSNRVSGKVLQRIGLLTLDCRTLQYVEPSAEFYVTIDKHNNVKLNDDNAIKASLSVLSIALTLSCFGKGGRRGLGCLDVDKVDGDYSFLFNLNHKEFAKKLNYTIELVKDIVKEMSKSGLESCELPPMPVVSNVELTKCVDVKVKNRYVDRLFVFQLFEVYGRDLLPKLHNFFLRPERAKILMGNPKAKDELRNEFMAWILGLPREQKGTGYRLMSNNIVRRASSMLLSIHGINNDVAYLALFLSADWPSGLTWHGAGSKPITINERDIINASYVALNEFLEYLGRQRIRWKRVWPQ

SEQ ID NO: 543 - DNA, 477 bp, Caldivirga maquilingensis
atgagtgagcaggttagggacaaggctttggatttagccataacttgcatcaacgcagtcaagaacctaaacaataatgatatacttaaggggtttaggactaggtgtaggagggaacttgagggtatttactacaatggtttaacgtatgaacttgcattcatactcgcgaagtcctcagacaagaacgggagtggttatggtaaattaaataatgtgcttaatgagaaggacataggaaagtacctaagcaatattaagaataaaataagtgatgaggcctatgaagtttatggggcatgccttctatgggccatgagggaattaggcttaattgatggggctaaggacttgatggatttacttaataaattgaacacactaggcaccgaagtcatagttactaataagattctgacattcgctgattggttgaagagacttgccgaggccatgatatctgaggtgactcaatga

SEQ ID NO: 544 - protein, 158 aa, Caldivirga maquilingensis
MSEQVRDKALDLAITCINAVKNLNNNDILKGFRTRCRRELEGIYYNGLTYELAFILAKSSDKNGSGYGKLNNVLNEKDIGKYLSNIKNKISDEAYEVYGACLLWAMRELGLIDGAKDLMDLLNKLNTLGTEVIVTNKILTFADWLKRLAEAMISEVTQ

SEQ ID NO: 545 - DNA, 954 bp, Caldivirga maquilingensis
atgcacccaggcactggtagcggtggtaagatcgtggatttagaggttcagaaggatgaatttgggattcccgttatatggtccagcagccttaagggtgccattaggagctccctcacactaaaccgctcaagcaatgaccagcgccataaagtgcttattaatgcggttttcgggcccgagcctggcactgacgaggtgagtgagtattcctctgtggttaatttcctagatgccaagctcctgctaatgcccattaggtcgctaaggggtgtttgggcctacgcaacctcgaggcatttgcttaattactataggacttacgtggatgccctcgagacacttaacaacaacttaagcaagtaccaaaatgccctggaccaattaatcaaactcacggaaaacattgaccagggcactgcagtggttagtaagggggaccttgtcattagtggtgggaaagccgtactcaatgaaatcgagttcaatgccaatgtaaatgtcaaattaaatgagaaattaaatgaagttgttaataaagcgctacctaacgtcattgctgagagggttaaggagagaggcttggtgttagttagtgatgatgatatgatggagttgattaagagaagcatcattatacaaacaagggtaaggcttgattactccaaaaagaccgtaactgaaggcgggctctgggaggaggagtacctaccccagttcactgttttcgtgtctggcgtggtgtgcagtaaacctagaattaatgagaaatccttcaaggaaaaggtgggtgattcaagtgatgtcctacagaagttcactaacatgaagaataacgcagaggaggtatgcaggtacttaaggggtgagacgcaagatccctccacgatcttcatacttggtggtaaggagaccttaggtaagggcttagccaaggtttggtggttgccatga

SEQ ID NO: 546 - protein, 317 aa, Caldivirga maquilingensis
MHPGTGSGGKIVDLEVQKDEFGIPVIWSSSLKGAIRSSLTLNRSSNDQRHKVLINAVFGPEPGTDEVSEYSSVVNFLDAKLLLMPIRSLRGVWAYATSRHLLNYYRTYVDALETLNNNLSKYQNALDQLIKLTENIDQGTAVVSKGDLVISGGKAVLNEIEFNANVNVKLNEKLNEVVNKALPNVIAERVKERGLVLVSDDDMMELIKRSIIIQTRVRLDYSKKTVTEGGLWEEEYLPQFTVFVSGVVCSKPRINEKSFKEKVGDSSDVLQKFTNMKNNAEEVCRYLRGETQDPSTIFILGGKETLGKGLAKVWWLP

SEQ ID NO: 547 - DNA, 3138 bp, Caldivirga maquilingensis
gtgagcagtattaattcgttttttgagaagaagctgttggctttaatgcatgatccacccaataaaatgtggatgataattaacggaaaagaccatgagaaagaagctgggagaatatataatgatattttcaaggagacgggaataagagagtttacagggggtgttccaccatataaggattataacaaccccaccaccaggattattaaggaagccgatttgttggcttcatccttcgataggtgggtattcctaaaacccagtggcgccaattacgtagttaagaacatcaggtacttaaacatatttaagccagccacgcacctcaaatatgaaataaagaaccaggatattaacattgataattacgtaaagaacataaacgacatccttaagaaattaaacagcaacataaaggataacccaagggcagtctacaacctactttacgcattatacgagagtgagtgggtaaagctaggcctaccaccaagcctagcagacacaagggcaccgacacacgatgtcttcgaccacgactacgcaaccgttatgataatgaactggttgcttaatggtaagttcagcggctactacgtggttggtgacataccgggtgttcagcagttcataatggcgagcaggaaggcgggggacctatgggctagtagctgggtaatatccatgaccatatggctcaccctatggccattgatatggcactacgggccggacatactgattagacccacggcgaggctaaacccgctgtattacacattcttagcggcatctttagacctagtagcagacggtaaggatcctgaggagtcagataacctatgtctaatacttaggaaagcaattgagtatgatattaaacacactaatttagtaaatttagtaatagaactaataaaaccgctattaaaaccattacttcaacaaatccaacaagatcaacaagagaaattgataaggagagtattgagcatcgcgtttataggcgaagcattccaattagcgctgccaccaatcaaccctgagggaaatgagctaaagaggctgaagaaggacgatatactcagcaagatcagggacaacttcgaaaaagccaccaaatgcctaattaatatatccagagacgaagtaaacaaggaagagaatgactatgtgaagaggatactccggagggccttagacaaaggattgatcgagctaaggctaccactaagggtggcagtgctagacgtaggcaacttatacagtaagtacaggagcgagaaaggatgcccattgagcgacgatgtgttgagggaaataggcatggacagggaggcgtgcctagacgcgctcttcttcgactacctaatgaccagcaaggacgtaataaaggcaatacgtgaagaggaaatgacgagaataccaaccaagggcgcatggttcgatgaacagggaaacctgcttttcacgaagctttatgacggtgactggacaataagcacgctaagcccagatacgccggcagtgatgaggttcggtaaacgctttgaaaataataggttatgctatgacgaaaagacaactaagtggttaaatgaattgctgaacataaacaaccctatatgcacaaatactgataataataacgaacgtagattaataagcacgttcaaaccaggagaggcgctgagcccagtggatctagccaagagattaatatatattgggttaagcgggaagttagaactgggcttcgagagtaccgatgacgtagccgtgaaatacttacatagcctactcgagtataacaatattgcaaataaagtataccgtcgtggtgataaatattgcgagagcttattgagagactatataatgaggcctaatccacccagggacatggacctaatatgcaaagaccaagtatgcggaaacccagaacaaataaggagactggccagagactgcgttgaggaattcggcaaaaaggaggaggacaagggggtcgctgaggaaataataggtaagttaaccaaggacggggtattacaggacatacacaacctagtgggtaatggggccgacatggcggtaaacgcagtgaaggagctcctcaacttccacttcatgtacgcgataataaggggtgacggggactcactgggcaggattcatcgcggtgaactacccaattactacgaatcactacgtgaattctatgaggacttaaaagagaaggctaatgaattggtaattggtaataaggatgaattcctgaaggacttggaaaaccaggaaaagttactaagtgagttagaggaaagattagaggaaaaagaggaaaagctagagggaaaaacaaagataagggtaccggtgactcctgcatataagtttgcaataacgagggcgctcatggtaacggcaatgagggtgctcgcaaggaccatggacatatccatgcccgtgtacctgggcggggacgacctattgattttgtcgcccgtggaggcagctctgaagattgttgaggactccaggaagatatactgggcagtggatgagaacacacccttcttccacaaggtcaataaggactacgtaataccagccctagcagcctatgggcaaagctactcaataaggtacgcacacctcctcgacatattctcagaggagtacctaagggcaggggaactccttgaggaggtggctaaggaggcgaggtggggcggtgattacgagaaggactcactggtcataagccactcgagaacgggcaccgaggtcgtactaccaataaggccagaaaataatggggacaactgggtgatcgactccatagatcgcctaaggaccctatggacagcgctgttggcagggctggtgagtagcaacacgcctgaggacttggacaaatacagcgaattattcatgagggatcaacccgacatggggataatcaaggacgtcttaaaaacaatactcaaaagaaacataaaggtgaccggcgaggagggtaagcaaaacgtggcgagtaaactcctgggtgaggatgtgtacgatggttactaccacaccgtgtggtacaacttaattaactcaataagaatactgaggcgattaccatga

SEQ ID NO: 548 - protein, 1045 aa, Caldivirga maquilingensis
MSSINSFFEKKLLALMHDPPNKMWMIINGKDHEKEAGRIYNDIFKETGIREFTGGVPPYKDYNNPTTRIIKEADLLASSFDRWVFLKPSGANYVVKNIRYLNIFKPATHLKYEIKNQDINIDNYVKNINDILKKLNSNIKDNPRAVYNLLYALYESEWVKLGLPPSLADTRAPTHDVFDHDYATVMIMNWLLNGKFSGYYVVGDIPGVQQFIMASRKAGDLWASSWVISMTIWLTLWPLIWHYGPDILIRPTARLNPLYYTFLAASLDLVADGKDPEESDNLCLILRKAIEYDIKHTNLVNLVIELIKPLLKPLLQQIQQDQQEKLIRRVLSIAFIGEAFQLALPPINPEGNELKRLKKDDILSKIRDNFEKATKCLINISRDEVNKEENDYVKRILRRALDKGLIELRLPLRVAVLDVGNLYSKYRSEKGCPLSDDVLREIGMDREACLDALFFDYLMTSKDVIKAIREEEMTRIPTKGAWFDEQGNLLFTKLYDGDWTISTLSPDTPAVMRFGKRFENNRLCYDEKTTKWLNELLNINNPICTNTDNNNERRLISTFKPGEALSPVDLAKRLIYIGLSGKLELGFESTDDVAVKYLHSLLEYNNIANKVYRRGDKYCESLLRDYIMRPNPPRDMDLICKDQVCGNPEQIRRLARDCVEEFGKKEEDKGVAEEIIGKLTKDGVLQDIHNLVGNGADMAVNAVKELLNFHFMYAIIRGDGDSLGRIHRGELPNYYESLREFYEDLKEKANELVIGNKDEFLKDLENQEKLLSELEERLEEKEEKLEGKTKIRVPVTPAYKFAITRALMVTAMRVLARTMDISMPVYLGGDDLLILSPVEAALKIVEDSRKIYWAVDENTPFFHKVNKDYVIPALAAYGQSYSIRYAHLLDIFSEEYLRAGELLEEVAKEARWGGDYEKDSLVISHSRTGTEVVLPIRPENNGDNWVIDSIDRLRTLWTALLAGLVSSNTPEDLDKYSELFMRDQPDMGIIKDVLKTILKRNIKVTGEEGKQNVASKLLGEDVYDGYYHTVWYNLINSIRILRRLP

SEQ ID NO: 549 - DNA, 996 bp, Caldivirga maquilingensis
atgagccaggcccgtgaattccttgaattaaggataaagcccatagagccactacacctcacggcaggccccataaggggcatagacctaataagcgcaaccagggcatcatacgcaccactacccacaacggtaatagggttactcgcaaacatatactatgaaacaaataataaaacccaaaccggtaaaatccaggacctagactgtggggtggaggatttgcttaaggttaaggatgaggctggtatagaggacgtatggggaccattaattgtaataaacgggagggaacacttcctggtggaaaacacgctactacccgtagagactctgaaggactatgtagaactcgtgaaaatggataaggaatgccagggggagtgttaccaagacctaactaaggaatactaccaattcagggaaataagcaaagtaggcatagcgattaatatggagactagaacggtaaggcagggattcatgtacgtacagaagtatacatggccgtatagagtaattaaggatgatgaatcggaaccagtaccaccgggatggtactataagtacataataatcatgaacccgcagaaggcggggtggatacgaggtaaaatcacgtggaacataggtggtgaaggtaggcaagcattaatagagatggggagaacaaaccaaaaaccaccacaacccacgaaagaagcaatactactcacaccactaatattcacaggggagaaaccatacgtggaggtagacaaaatagacccaaacatagggaaaatacatggaatattaacaagcaaggggccaaagataaaaatcacaacaacatcactaggctaccgtggtaaaactaatcaatcagaaaactgtagaagacccatatacccggcactaccgccagggacgcttgtagaattgaagcagcaggtaagtaaattagggttatatacgcaattagggtatggggcaacatacccactccccctctaa

SEQ ID NO: 550 - protein, 331 aa, Caldivirga maquilingensis
MSQAREFLELRIKPIEPLHLTAGPIRGIDLISATRASYAPLPTTVIGLLANIYYETNNKTQTGKIQDLDCGVEDLLKVKDEAGIEDVWGPLIVINGREHFLVENTLLPVETLKDYVELVKMDKECQGECYQDLTKEYYQFREISKVGIAINMETRTVRQGFMYVQKYTWPYRVIKDDESEPVPPGWYYKYIIIMNPQKAGWIRGKITWNIGGEGRQALIEMGRTNQKPPQPTKEAILLTPLIFTGEKPYVEVDKIDPNIGKIHGILTSKGPKIKITTTSLGYRGKTNQSENCRRPIYPALPPGTLVELKQQVSKLGLYTQLGYGATYPLPL

SEQ ID NO: 551 - DNA, 804 bp, Caldivirga maquilingensis
atggtgaattcacctcaatcaattgaggagttgaaattaaagaggacaatagtggtgagtgtgggcatgtatccgtataacgctattgtagcgataatgagtataggtgttgggccgggtgacgtcattatactggttaatagtgagcccaggaggattgaagacctaaggccccgtggaggtaggatgcagccggaggatgcgatgaatcagattagaaaaataatactcgataatatacctgaagtggatattaaggatgtgtggttatcgccgagtaggcaccttgctgataacgtggcattactcaggactcttgtggaatccttggcaccaacctcagtaaccatagccattgccggtggtttaaggtggttatccgtggttctcatgttcctggccatggcgttaaaaaccataggtgggtatactcgtgttaatgttgaggatgtcttcgtaatgcttgaggaggagagtcccagtataaagaggatctttccaggaattagggagaggataatacactggccgattataccagcattaaccagcatggataagctggagtatgaaatactgagaatcattacctctaaggaggatgggattaaggcaaaggagataatacaggcaattaatggtcaattcgaaaggagtagaaggccatcaaaggcatcaattgagaggaaactaacgaaattaaggaggaagggggtaataacgtatgagaaagtggggaaggcatacatatacaaacccaccgacttaggaaaaatattaaccaaacaatacacccttcagtaa

SEQ ID NO: 552 - protein, 267 aa, Caldivirga maquilingensis
MVNSPQSIEELKLKRTIVVSVGMYPYNAIVAIMSIGVGPGDVIILVNSEPRRIEDLRPRGGRMQPEDAMNQIRKIILDNIPEVDIKDVWLSPSRHLADNVALLRTLVESLAPTSVTIAIAGGLRWLSVVLMFLAMALKTIGGYTRVNVEDVFVMLEEESPSIKRIFPGIRERIIHWPIIPALTSMDKLEYEILRIITSKEDGIKAKEIIQAINGQFERSRRPSKASIERKLTKLRRKGVITYEKVGKAYIYKPTDLGKILTKQYTLQ

SEQ ID NO: 553 - DNA, 369 bp, Caldivirga maquilingensis
atgtcgcagtctagtcaagatgagtcgcaaaaggtaaagacatatacctttgaaaatatgattgatctcttagcaacctacgtcagtaatagtgagtatggtgtgctcgacgctatggtgaatgctcatgatatcgaaggatcacttaaggcgctctataacgctgttaggtacgcagttactaagggctacattaccaagccaaatgaattatacggtgaggtaaatgcattcaccgaggcagtcaggaggtatggcaagagaattatttacgagatcgccataaaggcgctcgtaaagggctacatgagggcctatgaaacaacgaaggctgctagtgaagagcaggagtctgtaagacaggggtga

SEQ ID NO: 554 - protein, 122 aa, Caldivirga maquilingensis
MSQSSQDESQKVKTYTFENMIDLLATYVSNSEYGVLDAMVNAHDIEGSLKALYNAVRYAVTKGYITKPNELYGEVNAFTEAVRRYGKRIIYEIAIKALVKGYMRAYETTKAASEEQESVRQG

SEQ ID NO: 555 - DNA, 1170 bp, Caldivirga maquilingensis
atggtcttcgtgagcatgggctttaggtttagggttcaggcagaagccatgaacatggtcgagtcatggggcaattacaccagacacagaataatacctgtaattaagagagtgaggacaaaaaacggagtaattaagtataaagttcagtacgcaccagcagtatcagggcaaagtattaattacgcattcatgaaggtactcactaaccttgcaattgaaaggaacttgccggtatgcgatgagtgcaaaagatatgaattaataggcggctttccgaagagaccagaaatagaggacaatgaagagaagaagctaattaacgaatcctttggctaccttaaagttgaggggaagagagtattggaatgcgttgttgaggatataacaggctttatggcagttacagagacagagaggggtggaaaaaggagaactaaaaaggagaaaaaccccgaaaaagagaccgatagaactgagaagggcgcaggcgttaaaaggaccgccaaggtttggttcagttacttactaccagaccccaacagcgacttctcagtgggacctcagttccacgttaggtttaatagggagaatcctgacgagcaggcagtaatccaggttgagtcagggagtgctatttacaccctctacaccttcattgacgttgacggaataggcgcatactatgagagggcgaacgataggtatgtacttaagtatgttaataaccgcagggagaggattaaattagtctttgacgcattaatgctaaccctgagcggacttcttggcgcgaagcagtcaaggtacctatcgattagggaatcccttagtggtattgccgtggtatctaaggttccatttatggtctctccagttgttttcggctacgactacgtgcaagatactgtagatagagcaaaaataattagtaaggtaatagttgaaacaagcactggcactggttcccaacaagatgccagctccgaatccaccacatctgtgattaaaatcttttactatgatagagaaggaatccacccaaaggaaagcaagccagaaaagaaagaaagtgagacctacaaggaacccatagaaataaatgaggtatctggacccgaggacatgatcaataaggttaaagagacagtcctaaatatgcttaaataa

SEQ ID NO: 556 - protein, 389 aa, Caldivirga maquilingensis
MVFVSMGFRFRVQAEAMNMVESWGNYTRHRIIPVIKRVRTKNGVIKYKVQYAPAVSGQSINYAFMKVLTNLAIERNLPVCDECKRYELIGGFPKRPEIEDNEEKKLINESFGYLKVEGKRVLECVVEDITGFMAVTETERGGKRRTKKEKNPEKETDRTEKGAGVKRTAKVWFSYLLPDPNSDFSVGPQFHVRFNRENPDEQAVIQVESGSAIYTLYTFIDVDGIGAYYERANDRYVLKYVNNRRERIKLVFDALMLTLSGLLGAKQSRYLSIRESLSGIAVVSKVPFMVSPVVFGYDYVQDTVDRAKIISKVIVETSTGTGSQQDASSESTTSVIKIFYYDREGIHPKESKPEKKESETYKEPIEINEVSGPEDMINKVKETVLNMLK

SEQ ID NO: 557 - DNA, 837 bp, Caldivirga maquilingensis
atgtacgtacttctcgttaaaatcaagtttttgagcggtttcatgttattaccaccccatgttattcaatcaagcggttacccagcaccttcacctactaccttagttggtgcgttggcctttccctacattaagttaatggaataccccgaacttgagagtaattactcgacagctaagtacctacttgaccaggtagtatacgcgagtttctgggctcctccttacatcacgcacctggatactgtgaggggattcacattaacctggcaaagacacgagagactaaggaacctaagtaaaataatagtttgcatagagaagaacatagattgcaaaaaagctgaggaagcaaaggactcggcttacggtcctctttcaatgccaattactgtttacgaggggcctgcttacatagcgtacgtggttaaggataaagatctagttaggtatgcgtacggcattgtcaggatcggcatgaaggagtccctagtagccgctgaaaagatgtggttattcgacttgagaagtatagtcgttagcaatattgagagtgtggagacgcgattttatgtcccagctaggctcgtgaattcatgcaataggtgcgatacttataaaatgcccacccttaatccgcagaactacagctctctcgccattcaagactacgttagtgaagaagatggaagtaaggtttacgaggttttctacgtcccgcgtaacattgacaacatgcaagtaaaacctaaagagggtgagaccctaacccttaggttacaagccgataatgaggagctaatgcttatagtgcctaagcaaggggtgatggaatga

SEQ ID NO: 558 - protein, 278 aa, Caldivirga maquilingensis
MYVLLVKIKFLSGFMLLPPHVIQSSGYPAPSPTTLVGALAFPYIKLMEYPELESNYSTAKYLLDQVVYASFWAPPYITHLDTVRGFTLTWQRHERLRNLSKIIVCIEKNIDCKKAEEAKDSAYGPLSMPITVYEGPAYIAYVVKDKDLVRYAYGIVRIGMKESLVAAEKMWLFDLRSIVVSNIESVETRFYVPARLVNSCNRCDTYKMPTLNPQNYSSLAIQDYVSEEDGSKVYEVFYVPRNIDNMQVKPKEGETLTLRLQADNEELMLIVPKQGVME

SEQ ID NO: 559 - DNA, 1032 bp, Caldivirga maquilingensis
atgagtaataacacagctagtaatacgcaagaaagcgcaaggaacgccattgagataaatctatgtaattcgtgggagttcaggcacatgagaatcacttggtatgcgaggtttatgctgatgtacgtaaagggtgatttggatatctttgacaaagacgtagtaagttccgaggacagcattcataataccttagaacaatacaacaactttgctaagagcaatgagttatgcagagaattaatagtcaatgataacgaagataatgagtacattaatctacaggactttaagcaaacaagaggtaaaaaacgtgaagaaattgaaaggcacggtatcagaattaaccggactgcatcagatgaattcaacattaatctaaaggagtacgtgagggggttcctaagatccatcgctagaaagagcgatgcatttagagtaagttacgcattacttaaggtggcattatgtggtgagcgattaagccgtattggtgcgaacaagcacgtaatactggatctgcgtgttgacgtgccagaactttatagtgaggtttttaatgatatacatagatacttcaggaaatttaatgggtggaggggcgagggagcaaagggagggagcaagccgacgcctgtggagtactcattactcatttacgccgcttccgtgatagccagtaagattaggagtagtgagccggcgatactttattacataactgagaatggggttgcctcgtatgaattaaacaacttaataagcgacttaaagcggttgaggatttatacttattataaaatgttgatagataagtataaccctgacgaacaaggttctgatgtgttactggggttcataaatagcttgacttatgcaatcatggtttacaacaggattagggatttagggccactttatgagacgttgaggatgcttagcagtgaggagttagttaatgagcttgagaaaagagagatctcagtgcttgagtttctgcgtaatctgtcgaaggcggctttttatgcctaa

SEQ ID NO: 560 - protein, 343 aa, Caldivirga maquilingensis
MSNNTASNTQESARNAIEINLCNSWEFRHMRITWYARFMLMYVKGDLDIFDKDVVSSEDSIHNTLEQYNNFAKSNELCRELIVNDNEDNEYINLQDFKQTRGKKREEIERHGIRINRTASDEFNINLKEYVRGFLRSIARKSDAFRVSYALLKVALCGERLSRIGANKHVILDLRVDVPELYSEVFNDIHRYFRKFNGWRGEGAKGGSKPTPVEYSLLIYAASVIASKIRSSEPAILYYITENGVASYELNNLISDLKRLRIYTYYKMLIDKYNPDEQGSDVLLGFINSLTYAIMVYNRIRDLGPLYETLRMLSSEELVNELEKREISVLEFLRNLSKAAFYA

SEQ ID NO: 561 - DNA, 1749 bp, Caldivirga maquilingensis
atgcctaatttaaaaccgagacctggtatagataaattattggaggtacttgatagcaagttaaaaggccacgaaaaaccctttattattgccgagttacctaccggttacggtaaaaccacagcatctccttatatttataagttagtcaatgagtacggcatctcggaccgcgtaattcacgtactcccccttagggctataattagaaagctcattcaggacattactgatgaaggaacatggatcggcagtttatttagggaaattaggctaggcattaatgatattgcctatcaaatgggcgaatttgtcgtaaacgttagaaaggagccgtttttcgacgcaaagtacaccttaacgactctggattccttcgtccataatctctttaagatacccattacagagctctacagagacaaaaagcattactttattccgctgggcaggatatttacatcaaccgtacttctcgacgaagcacacatagcattagccgccgaatccgagaaaacaatctctacggtaattgcatcaatcaacgcactacttagctcgcacgtgcctatagtaatgatgacggccacattaccgagcaagtacgagaaattaataattgaaaaagttaataatattaagaaagccagacccatagtaataaggcttgggaagaaggaagaggttaaaagtaacgaaatcacaataatcacagtccacgacccagatttcgaaaacacgtattccaatgttaagtatgtgcacgaaaaggtctctaaactcaggatcattgataaggcaatggatgaggtaaataatgggaggagggtccttatagttttaaacaacatacgtaaggtcataaacatttatagagaaatcagtgatagaattaatgacagcgacattgcgttggtacattctaaattaataggacgagatagagaaatgtatgagagcagaatcaataaggtgaaggtcctcattggtactagtgccatagaggcaggcgttgatgtatcattcgatacattaataactactatcgacaacccaatgtcctttattcagaggataggtaggatttgcaggaagggtccggacgactgcgccgatggggagggaagaatatacttgattaatgatgattcagataacctagagggggcaattaactatgttctcactaagaaaataaattggcgactgccctataacgtgagtaatgacttcatgggctacatggagttcctggaaacctttacggaaaagatgggtgcaataacttatgacgaaaggcacctaagtattctcaatagggtgttcatgaacatttacatctcaagcaaaacattgaatgagctacttaagttaactagggggtctttgctcagggagcccctgataaatgtattcattggtgacctcaataagccatgtagcgatgtggggatcaatgaatttttagagcggtcatttactatagacttaagtgaggtggtgttaaataaaagtggattctgcgcaaaaatgaaagagtgcatggtggggattgggatacttgagaatgatgtattaagctgcagttaccttactaacgactctgaagactttaaaaagagtctctgtactgacaacgtttataacatgttcttcaaactagttgagaaatataaggcaccattagttataattattaaagatgagtgttacgaggaaggcataggcttcaaactccacggtggttaa

SEQ ID NO: 562 - protein, 582 aa, Caldivirga maquilingensis
MPNLKPRPGIDKLLEVLDSKLKGHEKPFIIAELPTGYGKTTASPYIYKLVNEYGISDRVIHVLPLRAIIRKLIQDITDEGTWIGSLFREIRLGINDIAYQMGEFVVNVRKEPFFDAKYTLTTLDSFVHNLFKIPITELYRDKKHYFIPLGRIFTSTVLLDEAHIALAAESEKTISTVIASINALLSSHVPIVMMTATLPSKYEKLIIEKVNNIKKARPIVIRLGKKEEVKSNEITIITVHDPDFENTYSNVKYVHEKVSKLRIIDKAMDEVNNGRRVLIVLNNIRKVINIYREISDRINDSDIALVHSKLIGRDREMYESRINKVKVLIGTSAIEAGVDVSFDTLITTIDNPMSFIQRIGRICRKGPDDCADGEGRIYLINDDSDNLEGAINYVLTKKINWRLPYNVSNDFMGYMEFLETFTEKMGAITYDERHLSILNRVFMNIYISSKTLNELLKLTRGSLLREPLINVFIGDLNKPCSDVGINEFLERSFTIDLSEVVLNKSGFCAKMKECMVGIGILENDVLSCSYLTNDSEDFKKSLCTDNVYNMFFKLVEKYKAPLVIIIKDECYEEGIGFKLHGG

SEQ ID NO: 563 - DNA, 765 bp, Caldivirga maquilingensis
atgccttgctgggcctactaccctaagcaagacatgggggaccgcgagaagcctgaggaatactacttacacattaatgacataattgactatatgagtaagtcacccttgttaagcgctatcgtgaagaaaataaagtacataaccaatatagaggaggaattcattgtagactttatactattaagcggattgttccacgacattgggaaaacgattattcattaccagaaaaaccccgtgaacttcagtggccatgaagtcgcaagcatggtgtttgtgtaccatgcactcataaagataggcttacttaagagcaacgacattatcaagaagttaatggaaagtagcaacaccggtaagaaggagttatacgcagcactcaccctggtaccaatattcctacaccactatgcattcgggaactttaacgaaagaatcaaaaagggtctagagctagtaaacaataaggacgactttagaatctacgatgattgcaaagacgaaatcgagaaaacccttaagtacataaatgaaattataaaaagtgaagaagcaatcaaggtaatcaaggcagctaaggaattaataacaacaaatgacctccacatagtaattcacaaactagatgaccaggtcgaaaaagacctaccctacttaagttcagacagcatcaacctccgcattgcatcaaccgtactttcattactcaatgaagcagacggcagggtatccataaaaaaccgccgcagaaaccctaaatga

SEQ ID NO: 564 - protein, 254 aa, Caldivirga maquilingensis
MPCWAYYPKQDMGDREKPEEYYLHINDIIDYMSKSPLLSAIVKKIKYITNIEEEFIVDFILLSGLFHDIGKTIIHYQKNPVNFSGHEVASMVFVYHALIKIGLLKSNDIIKKLMESSNTGKKELYAALTLVPIFLHHYAFGNFNERIKKGLELVNNKDDFRIYDDCKDEIEKTLKYINEIIKSEEAIKVIKAAKELITTNDLHIVIHKLDDQVEKDLPYLSSDSINLRIASTVLSLLNEADGRVSIKNRRRNPK

SEQ ID NO: 565 - DNA, 30 bp, Candidatus Desulforudis
gtttccagcctacctacgagggattgaaac

SEQ ID NO: 566 - DNA, 945 bp, Candidatus Desulforudis
gtgccgacggtgctggtggtttcggtgggtggttcctgcgcgccggtggtaaatgcctgccgggagtacaacccggatcacatctattttctctgttcggggggcaagaaccccagtacggtggtggtggacgggccgggtgacccttgtggcgataaccgcaccgtgcgctgccccggatgcggcggcaccgtgcccctcggcaatccgaaaggaaagtcgatcgtgcaccaactcggactgggggccgaccggtacgagaaggtggtggtgaaggatccggacgacctgaaggcgctcttccgagaactggaaggtgtgcagcaaagcatcggtgcccgcttccaggtgccggcggtgcgcgtcgtcgccaactacaccggcggcaccaagaccatgtcggtcgccctggccctggtggtgttgctccgacagtgggagctttcgctcagcaagggtgagcgcaccgaccttatcatggtgcgcagcggggacattccggtgctggtggaccgctcgccttttgtcctggaataccacctggagcgtgtccgcgaactcctgaaccgctacgactaccgggcggcggaggaggtgttggccggattgacgcggcgcgaagttcaaccaagccccgagcaggaatacatcctgcgcctgcgccgcctctgccgagccttcagcctgtgggacacctttgatcatgcgggtgcttacgagtttctcagggtgtgcagcgggcaaaagctggcgccctaccttcaggcggcggccggcttggcgcggcgggagaaaccagaagaaaaatacgcgtcagtaatggatctggtcttaaacgccgcagaaatgaaaaggcagttcgaagaggccatcccgactgcctatcggcaggagggcaagcagacggtgattgttttggacgaggcccacctcttgagtgcctga

SEQ ID NO: 567 - protein, 314 aa, Candidatus Desulforudis
MPTVLVVSVGGSCAPVVNACREYNPDHIYFLCSGGKNPSTVVVDGPGDPCGDNRTVRCPGCGGTVPLGNPKGKSIVHQLGLGADRYEKVVVKDPDDLKALFRELEGVQQSIGARFQVPAVRVVANYTGGTKTMSVALALVVLLRQWELSLSKGERTDLIMVRSGDIPVLVDRSPFVLEYHLERVRELLNRYDYRAAEEVLAGLTRREVQPSPEQEYILRLRRLCRAFSLWDTFDHAGAYEFLRVCSGQKLAPYLQAAAGLARREKPEEKYASVMDLVLNAAEMKRQFEEAIPTAYRQEGKQTVIVLDEAHLLSA

SEQ ID NO: 568 - DNA, 315 bp, Candidatus Desulforudis
gtggactgggaaaaggtactgcgggaggcggatgagttggcccgccaactccggcgcgccggcgtggacttgaacgaagcggtgaacgaagcggaaaaagcgcttactttttacctttacaaaaactgcaacgaagaagcgatgcggcgctacttaagcacgatggccacgaatccgcctccccgcagcaagaagacgcagcgttactactgtgccatccgcgacctttgggaagggtggcgcaccgacctctccggccgcgacaaggcccgggcctggggctgggccgtccgcctggccaaggtagggaagtag

SEQ ID NO: 569 - protein, 104 aa, Candidatus Desulforudis
MDWEKVLREADELARQLRRAGVDLNEAVNEAEKALTFYLYKNCNEEAMRRYLSTMATNPPPRSKKTQRYYCAIRDLWEGWRTDLSGRDKARAWGWAVRLAKVGK

SEQ ID NO: 570 - DNA, 1020 bp, Candidatus Desulforudis
atgccgtttgacggaccccctgaaaaaccttatgcttttgcgccgctcccggaatcgctggcacgtgacaaagcgtccggccaccacagttaccgggaggacctgatgaccggagccttggagtgcgcgctggcgctgttacgaccggtgcaggtggcctcgggtattgtgagcttcgtgcgtggggaacgtagcggcgaacaactggccgctctgcatgcctcggttacccggggcggccggcgagtatacgtcattcccggctcctcgctcaagggcgccgtgcggagtgtggccgaagccgtttcccggtcctgtttttcggtagctgataaatcggtggaccgcttgctgcctggatcgctcaagcgctgcaggcaggtgcaggccctttgtccggcctgtcggctgttcgggatgacggccgggcggcgggaaaactacctgggcagtgtccacatggcggacgtcccgctcccgtcgggcggccgggtggcgctggtgtacaccccacttctctggacgcccgcgcccggccggcgtggcctgccgccgcgctacctgcaaaacagccgtgtccggggacgcaagttttactttcacggcaagacggcgaccggccccgatgcccgtatcgccttggcggccggccagactctccacaccaccatttatttcgaaagcttgagtccggcactgttgggcgtacttttcactgcgctcggacaacatccgcggtttccgtttcttctcaaacttggtgcggccaagccggtggggctggggagcgtgcaggtacaggtgacggctgcggaattgcggagtacgccggcgcagcgcggccgcctgggcggcgcggcgagccgccgggaaggcgaggctttagagacctggatcgccgagtgttgtcagaaagccgaagacgaaaacctcttaaaccttgcggggcttgagcaggtggccaccattctggggcgtgagggtctggacagccgccagttgccgtcggatccgtattga

SEQ ID NO: 571 - protein, 339 aa, Candidatus Desulforudis
MPFDGPPEKPYAFAPLPESLARDKASGHHSYREDLMTGALECALALLRPVQVASGIVSFVRGERSGEQLAALHASVTRGGRRVYVIPGSSLKGAVRSVAEAVSRSCFSVADKSVDRLLPGSLKRCRQVQALCPACRLFGMTAGRRENYLGSVHMADVPLPSGGRVALVYTPLLWTPAPGRRGLPPRYLQNSRVRGRKFYFHGKTATGPDARIALAAGQTLHTTIYFESLSPALLGVLFTALGQHPRFPFLLKLGAAKPVGLGSVQVQVTAAELRSTPAQRGRLGGAASRREGEALETWIAECCQKAEDENLLNLAGLEQVATILGREGLDSRQLPSDPY

SEQ ID NO: 572 - DNA, 645 bp, Candidatus Desulforudis
atgacggggtacgtgctgactttccgggagaacctggacaatggaagcgacgccgtcgaaatggtccggggggtcttcgcggctacgggcgcgcgcctggacgaggggttctgggcaccgggggcgacctggtggtatgcctggaacgaactggagattcagctcccgaccgtgtgcgccacggcggcggatctcgacgccgggcggctctttaatccccgctgggtcgtggtacgggtttttgccccccccgccgaactacggtgggaacgccagggacgggggcgggtggtgtgccttcttctggaagataatgcgcgccggcggttaccacccaccctggtcgcgggggcggtgcacaaggaaacgtacctggccactccgggacggcggctatggagcgggaggcgtctggacctgccgggcgggagccggcggggccgcgtggagtttccgcgtccacttgattatggcgtagaagatcacgattactccaagcctcttgccgcccgggtttacctctaccaggacgaggacggactggtgcaactggtccgctatgccgagccggagttattgtcagaacgcgtggcggtgcggcctcttggtcaccgcgaccgcacgctgaccgccgaggggggatga

SEQ ID NO: 573 - protein, 214 aa, Candidatus Desulforudis
MTGYVLTFRENLDNGSDAVEMVRGVFAATGARLDEGFWAPGATWWYAWNELEIQLPTVCATAADLDAGRLFNPRWVVVRVFAPPAELRWERQGRGRVVCLLLEDNARRRLPPTLVAGAVHKETYLATPGRRLWSGRRLDLPGGSRRGRVEFPRPLDYGVEDHDYSKPLAARVYLYQDEDGLVQLVRYAEPELLSERVAVRPLGHRDRTLTAEGG

SEQ ID NO: 574 - DNA, 900 bp, Candidatus Desulforudis
gtgcatagtcgtttttacaacgaagccgtgttcacgctgaccgtttctccgcgcacgccccttttgatcaaggccgggggcgagggggcggccgcgatggatcccaccgtgccggacatgaacttcgtgcgcaccaggcggccggacggccgggaggtgctcttcattcccggagcctccttccggggggtgctgcgggcgcacgccgagcggctgctgcgttcggtgcggccgcaagcggcctgcgacccgctggcccaccgcaagaagcgagagacctacgatttggagaaagcctgcacatttgatgacaagtcttctggacccgaggcttaccgcggggcgtgccacgcctgccgccttttcggcgccaccggcttggcgagccgggtgcgggtgagcgatttttacccggaaggagcccttgccaccgacacccgctacggggtggccatcgaccgggttaccggagcggtcgcccatggccccttcgagctggagatagtcaccgagggttcgtttgccggtgaactcaccctgcgcaattttaccttggggcagttcggcctcctgggggcggccttgctcgacgtagcggacgggctggtgccgctcggttttggtaagtcgcgggggctcgggcgcgtggcggtggagatcacccgcctggcggtgcgcaccctgcgcgatccggaaagccacatcctgggggtcggcgccctgtgcgacgaagcggcgcgccgggccttcgcggtgccgggggctgaccgggagcggctgctggtggcgggcgctcataccagccgcgctcggggtctctttgtcctggaggccgcgggcgagacagcgcgtcgctggctggaggcggccgcaccgcgttgggtgggggagctcgcatga

SEQ ID NO: 575 - protein, 299 aa, Candidatus Desulforudis
MHSRFYNEAVFTLTVSPRTPLLIKAGGEGAAAMDPTVPDMNFVRTRRPDGREVLFIPGASFRGVLRAHAERLLRSVRPQAACDPLAHRKKRETYDLEKACTFDDKSSGPEAYRGACHACRLFGATGLASRVRVSDFYPEGALATDTRYGVAIDRVTGAVAHGPFELEIVTEGSFAGELTLRNFTLGQFGLLGAALLDVADGLVPLGFGKSRGLGRVAVEITRLAVRTLRDPESHILGVGALCDEAARRAFAVPGADRERLLVAGAHTSRARGLFVLEAAGETARRWLEAAAPRWVGELA

SEQ ID NO: 576 - DNA, 849 bp, Candidatus Desulforudis
gtgagagcgtttgcggcggccggtttctgggatactttccggcaccggctggtggttaccggggagctggtctgtgataccgccctgcgggtgggcgccggtacggaggcgctgctgcccagcgcgagcgacctaccggtggtgaccactggcgggcggccgtacattcccggctcctcgctgcggggcgtggtgcgcagccaggtggaacgcctcgtccgcacgctggaacgggagccaaggaacgggcgtggggcctgcgaccccctggaggatacgggctggtgtattccccggaaggagatgcaggacctgcgtcgaaaagtccgcgagagggacgagggccgcgacgactggctggcccagcaggtctgggagcggtcctgccgggtgtgccggattttcggtagcccatggctcgcttcgcgggtacggttcagtgaccttttcccgctcggggagacgcatcccgaggtgcgggacggagtggccattgaccgcgagcgggaggcggtgaaaaacaagtacgacttcgaggtggtcccggccgggacgcggtttgcgctggagattatggccgagaatctcgggacaccggcggaaaggagccttttgtggctggggttgcaggagttggccgaaggcggcgtcccggtgggcggctttaaagggcggggcctcggccgggtgcacctggagcacttgcgggtacgctacgtggacgcgaccgaccgggaggcgctacaggcgtacctggtacgccgtgactggcgggaggccgggacagaggaaaggcaggagtggttgaacgcgttttttgcggaatgcggaggtgaggcgggtgcatag

SEQ ID NO: 577 - protein, 282 aa, Candidatus Desulforudis
MRAFAAAGFWDTFRHRLVVTGELVCDTALRVGAGTEALLPSASDLPVVTTGGRPYIPGSSLRGVVRSQVERLVRTLEREPRNGRGACDPLEDTGWCIPRKEMQDLRRKVRERDEGRDDWLAQQVWERSCRVCRIFGSPWLASRVRFSDLFPLGETHPEVRDGVAIDREREAVKNKYDFEVVPAGTRFALEIMAENLGTPAERSLLWLGLQELAEGGVPVGGFKGRGLGRVHLEHLRVRYVDATDREALQAYLVRRDWREAGTEERQEWLNAFFAECGGEAGA

SEQ ID NO: 578 - DNA, 426 bp, Candidatus Desulforudis
gtgaagtcggtgcagcaggcggtggacgccttaaacgagcaactggtggcgcgggcggagaagatcgtgcaggcgctgggcccgcgcgacgaaaaccagcaggacgtgagtaagtcccagttggcccgggcgatcgacgtggcgcgcgcggcgcagtcggccgcggtctttcaaaactggctggcctaccaggcgggccgaaaagaaaccggggccttctggaccacgcaggtgggcggtcgcccgttgatccgctgggtggagggaaccctcggctggatcgaaaaggaaattgacgcccagcaattgggggacgcggcggtgcgccggcaggccgttaccgaggcgctggtgcggtttctcggtttcttgcggcgcgcgtttgtcggtgccaagttcgtgctggagagggggaaagagcggtga

SEQ ID NO: 579 - protein, 141 aa, Candidatus Desulforudis
MKSVQQAVDALNEQLVARAEKIVQALGPRDENQQDVSKSQLARAIDVARAAQSAAVFQNWLAYQAGRKETGAFWTTQVGGRPLIRWVEGTLGWIEKEIDAQQLGDAAVRRQAVTEALVRFLGFLRRAFVGAKFVLERGKER

SEQ ID NO: 580 - DNA, 1272 bp, Candidatus Desulforudis
ttgcgctggcaggtacggttgcgggttgagggacctttgctggtgggcaagggaaccccgacgcaaaacgtgctactcgggcgcgactacatccccggcagcgtctggcgaggcgcgctcgccgaggccgtcctgcgggccgcgggcgctctggcgccgggtgcggcgggccaggccgcagaattgcctccggagttcggactggctttcggtccggaaacgcgctttggttttctttacccggtgccgggcgaaaagtgggacggttttccgctgcccctgacggtgcgttcctgcaaggcccggccggggtttgcctgcggcgtacacggccgggggaaaggcggcggccacggggtgctggacatgcttctcgtgacgttgcggcggcaccttggcttggctgaagagctgtccccggggtgtccggagtgtcgggagcggctggaccgctttcggggggtggcggcccgaatgccgctttcggccggccaggacacggcgtacgaaacggtaaaggtgcggcggcaactgctggtgcgggtcgggctcgaccggcgcaccgaaacggcggccgacggcgtgctttacgccctggacgcccaggtgccggggcgggaccgggcgctttactttacgggtacctggcgcgggacgccggaagcgctgcacgccctgcaccaactgctggacggcgcctgcccgcgcgccggcgacggctgggcgatccgggtgggtaccgcccgggcgcgcggtctcgggcgggccgtcctggaaattacggaggcgcaagccgtttttttgccgccgttggaagaacgtctggaggcctttcaaccgcggcagggcgacgggcagccggcggacccggaccacctgtgcttcgctttgctcctgaaggcaccgctactggtccgggacgcggccggcgtggcttgcggccttccggccgccgcggtgttggccccgtatgttacgtctctcccggtcggactggagtttttggaaacggtctcggtgctcgaatgggaaagctcagacggctgggccatggcctggggtctgcccaaaccggtgcaggcggccctggcgccgggaagtgtcctggcctaccgggcgccggcccgggagcgccgggcagtgctggccttcctggaggaagtggaaaacggcggcctcggtgagcgcacggccgaaggttggggcgaagtggtggcctgtgatcctttgcatcttaagtgcgacgcggggaaggaggcggtgaagcagtga

SEQ ID NO: 581 - protein, 423 aa, Candidatus Desulforudis
MRWQVRLRVEGPLLVGKGTPTQNVLLGRDYIPGSVWRGALAEAVLRAAGALAPGAAGQAAELPPEFGLAFGPETRFGFLYPVPGEKWDGFPLPLTVRSCKARPGFACGVHGRGKGGGHGVLDMLLVTLRRHLGLAEELSPGCPECRERLDRFRGVAARMPLSAGQDTAYETVKVRRQLLVRVGLDRRTETAADGVLYALDAQVPGRDRALYFTGTWRGTPEALHALHQLLDGACPRAGDGWAIRVGTARARGLGRAVLEITEAQAVFLPPLEERLEAFQPRQGDGQPADPDHLCFALLLKAPLLVRDAAGVACGLPAAAVLAPYVTSLPVGLEFLETVSVLEWESSDGWAMAWGLPKPVQAALAPGSVLAYRAPARERRAVLAFLEEVENGGLGERTAEGWGEVVACDPLHLKCDAGKEAVKQ

SEQ ID NO: 582 - DNA, 723 bp, Candidatus Desulforudis
ttgaacgaggtgtggcggttgacggtggaggtgcgcccgcttggaatgctgcacgtggccgggccggggcggccgcgcccactggtggaccgcaccgtggcggtggacgcgcgggggcggccctacctgccggcctccagtgtgcgcgggcgtgtgcgggcccatctggagcggcttttgcgggcgtacggcctgccggtttgtaccccgccgcggccacagcatatgtgtccgcacgccggtcttgcggggacaagtgacggttactgcctggcctgccggctcttcggcagcccctggcgggccggggcggtgacggtgaacgatttttacccggtcggtgtgtttgaggcgacggaggccgaatgggaacgaaatatggtggtgcggaccgggatcgggatcagtcgaaaacttggcaccgtgcgggaagagcggctctttttcacggaggcggtgcccggggatgatgcgctccggtttcggggtaccttggaggcacgggccgagcgggccgtggtcggctggctggtgggcacgctcggcctggtgacccacctgggcgggcaaaaaggacgcggcctgggccgggtggaactcgatgtatccggtgtggccgtgtggacccccgggcggggctgggaagagatgacggaacacgaggtcgagtctttttgccgggaggtggtgtcccttgcgctggcaggtacggttgcgggttga

SEQ ID NO: 583 - protein, 240 aa, Candidatus Desulforudis
MNEVWRLTVEVRPLGMLHVAGPGRPRPLVDRTVAVDARGRPYLPASSVRGRVRAHLERLLRAYGLPVCTPPRPQHMCPHAGLAGTSDGYCLACRLFGSPWRAGAVTVNDFYPVGVFEATEAEWERNMVVRTGIGISRKLGTVREERLFFTEAVPGDDALRFRGTLEARAERAVVGWLVGTLGLVTHLGGQKGRGLGRVELDVSGVAVWTPGRGWEEMTEHEVESFCREVVSLALAGTVAG

SEQ ID NO: 584 - DNA, 2280 bp, Candidatus Desulforudis
gtgagcaaaaacggtaaccggggaggtttggtggtgttcgaatggcgtgacggctttaccggaagaagatatggtttcaccaaggaacagcaggacgccgcgcggcggctggtagccgggctcttggaggcaaaactgaaaaaagaggtcggcgatgacctgcgggcgctggccgatgcggccgccgcgttctgggcgcgggattattaccgtttggtttttcccctggcgttcggccgggaagtggtcgatggcggagtgcgggccgtgtttttggacgaccccggtgaccgggtggatcagacggcggttttccggagagccccgctcgacggcgcggcccggccacccctgttgccggcgggcgggcgggcgccggccgagtatctcttagccgacgtggtgctggtgcgggcggccctcgcgaatatttactgccgtcagcgaggtgtggatcccgggcttttgcacgtgctgcggctcgcctgtttcacagggccgttggccgccgagttggccgcctctggttttgacctgccggaggaggtacgccgcctggtggatttcctggaaggcgacggggaaccgccggcggagctggatgcagaggatctgcgccgactctgggaggcgggggcggtagccgcggaggaggcgatggacatagcacccgcctccttcgcggtcaccgtggtggtcggggcggtgcagcgcgttaagcagtacgtctttgagacgccggggttgaacgagatccggggcggttccgagatactgagcgacgtaacggagcggctggccgtggacgtcgccacggaactgggcgccgaggtggtgctgcgggccgccggatcccacctggaattcttggtaccggacgccgagaccggtgcggcgtgggaggcgcgcctgcggcgggagtttgtcgcggccacggggggcgtgttggtggcggcggcggccgaaacgttgccggtgcgggacctgctcggcgattactaccgggcgatgggccgggtgtaccaacggttggaggcggctcgcaaccagacgcgcccactatatccggaaaccctgccgtttgaggagcggtgcgccatttgcggccagcgggccgccgaagggtggtaccagccgccggagggcgacgcggagccgatctgccgggtctgcctgattaaaagggagtgggggcgtgacgcccggcgggataaaaccagggaactggaggagcagctccggggcggcgggcgcgctctctgggggctcggtgcggacgccggactcccacagtctttggacgacctgatcgtgggccacccgcgccgccgcctggtggcggtggtgtacggggacggcaacaactttggcgccgtggtgcagcagctgaagaacatcgccgtggcgcggcagtggacctgccgggtggaggcggtgacctggagcgcgaccgccctcgccctggccgaagcggtgcgggtgagcgtacccgctccgcatgcggcggcgaaagaggcacagcggaagccgtcgttacctttccaagtgctcgccctgggtggggaggacatcggtctctttgcctgggggccggttgggctacgctttgccgagcgtttcgtggcgttgaccgaccgggagtttaccccggcaccgggccacgacggcgcccggatctgcttttccctgggggtgctggttgccgatgccaaagcggcggtggcgcgcaccgtggcctttagcgagggggagttgctgaagtgggccaagcgggcggcgcggaacgccgggtaccgggacgggggtacgatcgccttcctggtggtgccgacagccgaccagatccccggcgatctcgacgatttccagcagaccatgtactaccgggagggggcgaccttcccggtgtgcctgactctgcgtccggtcacggccgcggaactggggtttttgcttgaccgggccgcgcgtttacgggaagcgggtttcgttggcgcgcttggccgaatggcggcggccttcgtccggggcgagccgcgcgtggccgtgctctattacctttaccagaaggcccgcgaacgcaagggccgcgacgacgggggttttaccgcgcttttggaggacacacgcgagcggccgccgacactggccgaccttgacttcgccggccgggtgctcggtacgcggcgacctttcggcggtgaaccggtcgccggcgggcgcgaaacctactttgcgccgctggtggatctggcggaactggtcaaggttctggaataa

SEQ ID NO: 585 - protein, 759 aa, Candidatus Desulforudis
MSKNGNRGGLVVFEWRDGFTGRRYGFTKEQQDAARRLVAGLLEAKLKKEVGDDLRALADAAAAFWARDYYRLVFPLAFGREVVDGGVRAVFLDDPGDRVDQTAVFRRAPLDGAARPPLLPAGGRAPAEYLLADVVLVRAALANIYCRQRGVDPGLLHVLRLACFTGPLAAELAASGFDLPEEVRRLVDFLEGDGEPPAELDAEDLRRLWEAGAVAAEEAMDIAPASFAVTVVVGAVQRVKQYVFETPGLNEIRGGSEILSDVTERLAVDVATELGAEVVLRAAGSHLEFLVPDAETGAAWEARLRREFVAATGGVLVAAAAETLPVRDLLGDYYRAMGRVYQRLEAARNQTRPLYPETLPFEERCAICGQRAAEGWYQPPEGDAEPICRVCLIKREWGRDARRDKTRELEEQLRGGGRALWGLGADAGLPQSLDDLIVGHPRRRLVAVVYGDGNNFGAVVQQLKNIAVARQWTCRVEAVTWSATALALAEAVRVSVPAPHAAAKEAQRKPSLPFQVLALGGEDIGLFAWGPVGLRFAERFVALTDREFTPAPGHDGARICFSLGVLVADAKAAVARTVAFSEGELLKWAKRAARNAGYRDGGTIAFLVVPTADQIPGDLDDFQQTMYYREGATFPVCLTLRPVTAAELGFLLDRAARLREAGFVGALGRMAAAFVRGEPRVAVLYYLYQKARERKGRDDGGFTALLEDTRERPPTLADLDFAGRVLGTRRPFGGEPVAGGRETYFAPLVDLAELVKVLE

SEQ ID NO: 586 - DNA, 30 bp, Candidatus Desulforudis; identical to SEQ ID NO: 565

SEQ ID NO: 587 - DNA, 264 bp, Candidatus Desulforudis
atgtacgtcatcctggtttacgacgtaaacgtggctcgggtgggcaaggtgctgaaaagggcgcgccgctatctcacctgggtgcaaaactcggtactcgagggcgaactgaccgaagcctcttatcgcgccctgaaaagcgacctggcccgggttatcgacacccgcgaagactcggtgctgttttacgtattgggagcccgcaagtacactcgccgcgaactaatgggcgtccaaaaaggtggtgaagagtggatttactga

SEQ ID NO: 588 - protein, 87 aa, Candidatus Desulforudis
MYVILVYDVNVARVGKVLKRARRYLTWVQNSVLEGELTEASYRALKSDLARVIDTREDSVLFYVLGARKYTRRELMGVQKGGEEWIY

SEQ ID NO: 589 - DNA, 996 bp, Candidatus Desulforudis
gtgcaaaaaacactttatctcttcgcgagcgggcggctgcggcgtaaggacaataccgtttgcttggaaagcgaaaacgccactaaatacttcccggtggccagcctgcgggacattttcgtgtttggcgaactcgacctgaacaagaaactgttcgagtttatggaagaacaggagatcgtcctgcactttttcggctactacggcaactacgtgggcagtttttacccgcgggagcactacaactcggggtacgtcatcctgcgacaggctgaacactacctcgatggggcacgccgcctggaactggcgcgccggtttgtggaaggggcactcgccaacatcctccagatcctgcgttactaccagaaccgggggaaggagttggcgggctccatcgagtccatttcgcgactgctcgaaggaagcctgccggcctgcggccgtgtggaagaactgatggccgtggagggcaacgcccgggaatactattacgaaagcttcaacgttatcctggacaaatcgccttttaccatgcccggccgcagcaagcgtccgccgacggatccgttaaacgcgctgatcagcttcggcaactccctgatctacgccaagatcctgaccgaaatctacaaaacacacctggacccgcgcatcggctacctgcattccactaattttcgccgcttcactttgaacctcgacctggcggagatattcaaaccggtgctggccgaccgcgtgttgttccacctgttgggcaaaaagatgcttgacctgaaggatttcgagcagcagggcggggcctatctccttagagagcggggccggcgcctgtatgtcgaaaccctggaagaaaaactgcaaagcacctttcatcaccggcggctgcgccgcaacgtgagctaccagaccctgctccgtttggaactctacaagattcaaaaacacctgatgggcgagcagccctacaaaccgttcgtcagtcggtggtaa

SEQ ID NO: 590 - protein, 331 aa, Candidatus Desulforudis
MQKTLYLFASGRLRRKDNTVCLESENATKYFPVASLRDIFVFGELDLNKKLFEFMEEQEIVLHFFGYYGNYVGSFYPREHYNSGYVILRQAEHYLDGARRLELARRFVEGALANILQILRYYQNRGKELAGSIESISRLLEGSLPACGRVEELMAVEGNAREYYYESFNVILDKSPFTMPGRSKRPPTDPLNALISFGNSLIYAKILTEIYKTHLDPRIGYLHSTNFRRFTLNLDLAEIFKPVLADRVLFHLLGKKMLDLKDFEQQGGAYLLRERGRRLYVETLEEKLQSTFHHRRLRRNVSYQTLLRLELYKIQKHLMGEQPYKPFVSRW

SEQ ID NO: 591 - DNA, 537 bp, Candidatus Desulforudis
atgggaatagatgccaaattccaggaagcagcgcctttccatttgcaaccggttgtaggtagcatggttaacgcctatattatttgccccaggaaggcctggcttatgtcccggcagatctgccccgatgaggacaatacctatctccacctgggccggcttattcagaaccagagctatggccgcgagcgcaaggaggtgcgcctggaacacttgtgcctggaccttatccgccgggaggaagaaaccctggtggtggcggaggtgaaaaaatcctcccgggcccgggaagccgccaggatgcagttagctttttatctttatgaactggagcagatgggagttgaagccgagggcgaactccttttccccgaggagcggcggcgggaacggatggtgcttgatccggagttggcccgccaggtggagaatctgaaggccagggtgcgggcgttgattttggcgcccagcgccccgcttccgacccgcatccgtttttgtgcccggtgcgcctatgccgagttctgttgggcgtga

SEQ ID NO: 592 - protein, 178 aa, Candidatus Desulforudis
MGIDAKFQEAAPFHLQPVVGSMVNAYIICPRKAWLMSRQICPDEDNTYLHLGRLIQNQSYGRERKEVRLEHLCLDLIRREEETLVVAEVKKSSRAREAARMQLAFYLYELEQMGVEAEGELLFPEERRRERMVLDPELARQVENLKARVRALILAPSAPLPTRIRFCARCAYAEFCWA

SEQ ID NO: 593 - DNA, 2190 bp, Candidatus Desulforudis
gtggatgaattggtcctcctgggaaagccggacgtccctcttttagcccacttaaaagaggtgaccgaacaggggaaaatactggcccggcacttgggtcttccgccagcgctggagaagcgggctctgctggcctgcgctttccatgatgtgggcaaggccaccagaagctttcaggattatatgcgcgggaaaaggggcaagggctatccccacgcccttgcctcccttccctttgctttagccgccgagctttatactttgcaggcctctcctctggcagcagctgccgtgctgagccatcattcaccccttggccccgaagtttatagaggctatagggcacctgactacgttgatgaaaaaaacctcgcggcctttttggaagatgtagtggcctttttgcagggactgggctgggaaggcaacttacctgctgttgaaaagttgctgaagctcgctaccagcgacggaactcccgcaaccctacttgataacagcaggtttcgctttggggaggagttgataagtcttaggggtttattcaaagaattgcctcccatagattttgctgatataaaggcagttcttcagcttgccgactgggttgcttcttctggcaaagctcaggcgggggatctttttttgcaccaggggagaaaacttgttcttaccagcatcaaggaaaagagcatacagttaaggcctttccaaaagaaggcgggcgagatgaaaagggaaaggctctggctgcgggcccccacgggaacaggcaaaaccgaagccctgctcctttgggctggggatacggagcggcttctttatcttttgcctacccaggccacggctaatgccatgtggaagcggcttaaaaagatttacggcgaagaaaatgtgggtttggcacacggtagggccgggtacatcttaaggaaagaactagaggaagatcctttggatgtgcgactttgggcctctgtcttcgccaggccggtggtagtgggcaccctggaccagtatctcatggcccatcttcagggaaggcactgggagatacgccggtccctcgccagaagagcaaccgtagttttggacgagatccacagctatgatccctacaccctggggctccttcaggaagctctggcccaggaaccgccggcccgtctggccctggccagcgccaccttacctgaatttttgccggaactgttgggccaaggcccccttttggaggccgaagagcctctttggcagcggaagcgccacgagcttcgcctttttgtcgaacccgtagctagcgcgctggaagaagccctgtcttttgtcagacaagggaaaaccgtcctcgtcatagccaataccgtcaaacaggcccaggagatttatcaggccctccaggaagacggtgattaccaggtacacctccttcattctcgctttgctttccgggatcgctggaaaaaggaggagcagctgggaaagacaataccagggacaatcctcgtggccacccagattgtggaggttagcttggacatctcctatgatgtccttttcaccgaggtggctcccatagatgccctggtgcagcgtttggggagggttaaccgcaggggaattactccggaaggaacgactgcgcccccggctcctgccttcatctttctcgaatgggacaagggttcggaaaaaatatatggccaggaaattttgacctggagcagggatattttaaacgatatgcctcaacaccccactgacggagaatgggtgcaggctaccaaccgtctttacgaagtgcaggcatcaagcccctcttatcaggaagacctgcgggaagggcagcagacgctgcgcgaggtgcaaaggatatcaggctgctacaccatagatctctccgatgaggaaatgcaaaaaaagtttaccacccggaagggccagctttcggtagaggttctcccgcaagcccttaaggatgaggcgtttgctctgagggagaggggcgaacactggcgtctagtggagcttttggtccctgtgcccgtatactggctaccagctttttcccactggttttccccgttaagtgacctgggagtttttctcacagacctgccctatagcgaggaaatgggtttgatgccgcctggtgaaggggaggccccccctggcatggagatatactag

SEQ ID NO: 594 - protein, 729 aa, Candidatus Desulforudis
MDELVLLGKPDVPLLAHLKEVTEQGKILARHLGLPPALEKRALLACAFHDVGKATRSFQDYMRGKRGKGYPHALASLPFALAAELYTLQASPLAAAAVLSHHSPLGPEVYRGYRAPDYVDEKNLAAFLEDVVAFLQGLGWEGNLPAVEKLLKLATSDGTPATLLDNSRFRFGEELISLRGLFKELPPIDFADIKAVLQLADWVASSGKAQAGDLFLHQGRKLVLTSIKEKSIQLRPFQKKAGEMKRERLWLRAPTGTGKTEALLLWAGDTERLLYLLPTQATANAMWKRLKKIYGEENVGLAHGRAGYILRKELEEDPLDVRLWASVFARPVVVGTLDQYLMAHLQGRHWEIRRSLARRATVVLDEIHSYDPYTLGLLQEALAQEPPARLALASATLPEFLPELLGQGPLLEAEEPLWQRKRHELRLFVEPVASALEEALSFVRQGKTVLVIANTVKQAQEIYQALQEDGDYQVHLLHSRFAFRDRWKKEEQLGKTIPGTILVATQIVEVSLDISYDVLFTEVAPIDALVQRLGRVNRRGITPEGTTAPPAPAFIFLEWDKGSEKIYGQEILTWSRDILNDMPQHPTDGEWVQATNRLYEVQASSPSYQEDLREGQQTLREVQRISGCYTIDLSDEEMQKKFTTRKGQLSVEVLPQALKDEAFALRERGEHWRLVELLVPVPVYWLPAFSHWFSPLSDLGVFLTDLPYSEEMGLMPPGEGEAPPGMEIY

SEQ ID NO: 595 - DNA, 717 bp, Candidatus Desulforudis
ttggcttcttttcgccggcctttggaccacaactaccagcgcaccttgcctttgccgccccccaccaccctttttggattggcaggggctgcccggggtctggcggaagaggaactttggcaggaggcctcccccctgcgggatctcctggttgcgaccctggcccttcaaaagccagggcttgcccgggacatgtggacggtgatgaagatcaagaataataagctggcggaacgctctccgtatttccgggagatcctgttcaatgcccgctttatgatcctctatggggggcctgaggaacttctggcagaattacagcaggccttcctggaccccacttaccccttgtctttaggacgggaagatgagctgattgtggtcgaagagctgggcaggggggagacctgccctggagccccccttttttcaggaaccgttattcctggcgacctccaggggctccggtttaaatgggttccccggccgggaattgcctttgaaccgccagcggttgaaaccatgcccttggcctttgaagttgataaaagggggattcgctaccccctgaaccccaggccctttactttcctcccctatgatttggaggtggaactggagggataccaggacgccctgaccatagaacctctggaagggaggagctttacgtggatgaattggtcctcctgggaaagccggacgtccctcttttag

SEQ ID NO: 596 - protein, 238 aa, Candidatus Desulforudis
MASFRRPLDHNYQRTLPLPPPTTLFGLAGAARGLAEEELWQEASPLRDLLVATLALQKPGLARDMWTVMKIKNNKLAERSPYFREILFNARFMILYGGPEELLAELQQAFLDPTYPLSLGREDELIVVEELGRGETCPGAPLFSGTVIPGDLQGLRFKWVPRPGIAFEPPAVETMPLAFEVDKRGIRYPLNPRPFTFLPYDLEVELEGYQDALTIEPLEGRSFTWMNWSSWESRTSLF

SEQ ID NO: 597 - DNA, 975 bp, Candidatus Desulforudis
atgaacaacctgcaacagagtaaagccattgctttggggtatctcatgaaagtatcggcaggaaacatcaacgcttcccatacagaaggcaatgtcatggtggcgaaaaaagtcaccttgcccgatggtagttctgttccctatttttccgggcaagccaagcgacgcatgttacgagaccgcctggaagatctgggcttcaccttgtccgaggcctcggctctggttagcggccaggaggtcacgccgcctgtacggccgtgggaatttgtggacgaagaccttttcggttatcttgacccttcaggcaaccgccgccggacttccccggttcgggtatcggcagccgtgggattattctccttccagggcgaccgggatctgggtacccgttccttcgaacgttttggccaggatatggcagcagggggcaacatgttcgagaccgagctttacgctaatatgtttaagggcaatatgctggtggaattagaccgggcaggtattttcagcgaccaggaggtaggtaagaataacaaggaaataccagaggcgctggaaaaaatagaaagaaatggtcgcctgttttacgtcctaccaggggaagagcgccagcgtcgccttcaggccctgctcgacgccttgggcctcctctggggaggggggcgcacggcccggatgctgagcgatctttcgccccggtttttcgtttatgcccgcctaagagtgaagcatccggtattcctggaagctctacaagcccgctatttagagggcaggtatgggcttgttccagatcctttacggacagccctggacaaattcaaggatttccggcaggcagttattttcggtttagaggctggatttttgggcaatgaggaagagatccgggcggagcttcagaactacggccctgttctcagtgtccacgaggccatagcccaagccaaggaggatattaaaaagctatga

SEQ ID NO: 598 - protein, 324 aa, Candidatus Desulforudis
MNNLQQSKAIALGYLMKVSAGNINASHTEGNVMVAKKVTLPDGSSVPYFSGQAKRRMLRDRLEDLGFTLSEASALVSGQEVTPPVRPWEFVDEDLFGYLDPSGNRRRTSPVRVSAAVGLFSFQGDRDLGTRSFERFGQDMAAGGNMFETELYANMFKGNMLVELDRAGIFSDQEVGKNNKEIPEALEKIERNGRLFYVLPGEERQRRLQALLDALGLLWGGGRTARMLSDLSPRFFVYARLRVKHPVFLEALQARYLEGRYGLVPDPLRTALDKFKDFRQAVIFGLEAGFLGNEEEIRAELQNYGPVLSVHEAIAQAKEDIKKL

SEQ ID NO: 599 - DNA, 1545 bp, Candidatus Desulforudis
atggctcaaaagagggctccctcagggcagttcaaaaacccccaaaagcaagtcaatattattcaagtgcagctggacctccggcattctactggcaacttttggatagacaacggtttggtgtatctggtcaacgagttagggcagggaacctacccggttgacaacatcctggctttggtgcaggaacgtcttctgcaaaaaacgggcaacgtgggccagtattttgatgaagttaccggagaattaaagaattacgacaaagtaacctgggtttacccaactggtttttttatcaaggttgtggatgctccgccaaaaaagaaggtcaatggcaaagagtatcccctttctcctcctcatcccaggctggagttcctgttcagcaaaacaaaaaaacaatgtaacatctgcggggcccaggcttcggctaccgacgccaagatgtggatgttcccctttattgtcgctcctgacaaattcggcagcttttattcccggggtaagagggggatcaatctctgtccccggtgtgccgtggcgggaacagcaggctatctgacctggctttgggtagcccagggaaggacggctctgcacttcttcctttttcacagcgatttggccgaaatatcccggctgcaaaaggaggtgatccagcctttagccctttcaggaagcaggggcggcaacatagttctacccttttacggcccctatctgcacgagacaaccatggccctgctgttgaaactctttgcccatgtccagagttcggatcagataccagaagaagggagaatgcttctagcctccctcttgggggcggacgaaacgctgcctcctgcgccgcttacgctgtacgctatcaccggtaatccgggacaagccttcaacatgcagcttttccgcgagttttcccgcctacacgccctataccgcctttaccaggactggctggaggtggtgccggcggagaaccctcaacaaaccttaatcaacgtttttcgccagtttcaggtcagggagggcaaccagtacaacactttatggcgggaaaagatttcctgggctgtgctggaattcgacgatcccctgccttccgtagaggctttcctcttcgaggcgcgggctaaggagaaaaatctgccaccgctattccagggcacggaagccgtgttaagctattatgccaaggaggtattgcatgtggacgaaaacctgctgaaagttttaaagggctttggctatactttggggaccgaggcccaaaagtctaacgagatggggctcctctatgccctgcgcaatgccaagaacctggaggaattcttacgggtcttgaatgatatccagtttcgcctggagattacagtccccgaaaggcttgtagaaatcggccaaggggagcgcatagcgggcagcccctggttgcgggtaaaaaccctgctttctatctacgccatgaacagctatctgagggccgccaggggttccagaactgaagaaggaggaaatgtctatgaacaacctgcaacagagtaa

SEQ ID NO: 600 - protein, 514 aa, Candidatus Desulforudis
MAQKRAPSGQFKNPQKQVNIIQVQLDLRHSTGNFWIDNGLVYLVNELGQGTYPVDNILALVQERLLQKTGNVGQYFDEVTGELKNYDKVTWVYPTGFFIKVVDAPPKKKVNGKEYPLSPPHPRLEFLFSKTKKQCNICGAQASATDAKMWMFPFIVAPDKFGSFYSRGKRGINLCPRCAVAGTAGYLTWLWVAQGRTALHFFLFHSDLAEISRLQKEVIQPLALSGSRGGNIVLPFYGPYLHETTMALLLKLFAHVQSSDQIPEEGRMLLASLLGADETLPPAPLTLYAITGNPGQAFNMQLFREFSRLHALYRLYQDWLEVVPAENPQQTLINVFRQFQVREGNQYNTLWREKISWAVLEFDDPLPSVEAFLFEARAKEKNLPPLFQGTEAVLSYYAKEVLHVDENLLKVLKGFGYTLGTEAQKSNEMGLLYALRNAKNLEEFLRVLNDIQFRLEITVPERLVEIGQGERIAGSPWLRVKTLLSIYAMNSYLRAARGSRTEEGGNVYEQPATE

SEQ ID NO: 601 - DNA, 795 bp, Candidatus Desulforudis
atgcagctcactatcttctttagcgctcccgggccggtggccatacccgtccagtacgggcacttgctccaggggttgatctaccgccggatggataatccggtactcaggagctacctgcacgagcatggctttgccctggagaagcgccgctttaagcttttcactttttctcgcctgatgggacaggcggtgacctacgaccaggcggctggacggctggtgcttacgccgccgttgcgactggtgatctgttcccccatccctttcatcctccaggagctgggaaccggttttctccgccagggccgggtccgtctgggcgatgcccacctggaggtgaagaagatggcgacggcagccccgtgggtaacacgggagacccttcaggtgcggatgctttccccgctggttgtttacagtaccctttccggcgttgacgggcggaactacacgtattattattcgccctttgagccgcgcttcaccgagctggtggcaagcaaccttgcaaaaaagcactttttggtctacgggcagccggcgcgggcggagggcttcgccatccggccggtgcgggtggaagaccgggacctgaaggttacttactataaagatactgtcatcaaaggttggatgggggagtacgaactttcaggcgatctggagcttttgcagctggccctggacgcaggtctggggtcgaaaaattcccagggttatgggtgctgcaacctggtagaaaaggcttctcaagttagtagtcgctataggcggaatagtaatattatgtaa

SEQ ID NO: 602 - protein, 264 aa, Candidatus Desulforudis
MQLTIFFSAPGPVAIPVQYGHLLQGLIYRRMDNPVLRSYLHEHGFALEKRRFKLFTFSRLMGQAVTYDQAAGRLVLTPPLRLVICSPIPFILQELGTGFLRQGRVRLGDAHLEVKKMATAAPWVTRETLQVRMLSPLVVYSTLSGVDGRNYTYYYSPFEPRFTELVASNLAKKHFLVYGQPARAEGFAIRPVRVEDRDLKVTYYKDTVIKGWMGEYELSGDLELLQLALDAGLGSKNSQGYGCCNLVEKASQVSSRYRRNSNIM

SEQ ID NO: 603 - DNA, 972 bp, Candidatus Desulforudis
atgagcacgaggcggacttgccttgtcagcgcgcgaaaaacgccgacgacgaacgccgggctttggctggacaaattcatccgcaatcaggctagagaggataaggatagccgccatgatctagtgcgagaggtatctgatataccggtgccggaggagtactcacgctggtttgagcgttggcggcgggtattacaagattatggagccgcatgcagggtggccgaggttttagggcgcatagccgtgggcttgggcgaagagagcgtcctggaaacatcggttgcattgcaccatacctatggcgtgccctacattcccggtagtgccctcaaaggactggccgccagctttgcccgtcagtatttaggggatgattggcaggcgaacgccggggcatataagacagtttttggcgataccgataccgcaggctacgtcatttttttcgatgcgctgcccctgcctggttccaggcttttataccccgatgtgattactgtccatcatgaagggtactaccaaaaaggggacaagcctccggcggattgggacagtccgaacccggtcccgttcctgtcggccacgggcaaatatctggtggcgttagcagggccagatgcctgggtaaaggcggcgttcgagattttacagtacgccctccttaacttgggcgtaggagcgaaaacctccagcggctacggacgattgaggttggagtcagttcctcccattaccggcgtagaggacagaaaggttgatcagttaattaaccagatccgggcgttgaggacttcggaagttgcaggacgcattcaggccttttatgaacagtggtggaagcttgatgttagcccggagcataaacgccgtatagcagaggccattgtggccaaggtgaaggaagccggacgtgagaagcagtcactggacaaagactggtacagagagttgctggagagccttcgttaa

SEQ ID NO: 604 - protein, 323 aa, Candidatus Desulforudis
MSTRRTCLVSARKTPTTNAGLWLDKFIRNQAREDKDSRHDLVREVSDIPVPEEYSRWFERWRRVLQDYGAACRVAEVLGRIAVGLGEESVLETSVALHHTYGVPYIPGSALKGLAASFARQYLGDDWQANAGAYKTVFGDTDTAGYVIFFDALPLPGSRLLYPDVITVHHEGYYQKGDKPPADWDSPNPVPFLSATGKYLVALAGPDAWVKAAFEILQYALLNLGVGAKTSSGYGRLRLESVPPITGVEDRKVDQLINQIRALRTSEVAGRIQAFYEQWWKLDVSPEHKRRIAEAIVAKVKEAGREKQSLDKDWYRELLESLR

SEQ ID NO: 605 - DNA, 378 bp, Candidatus Desulforudis
gtgcagacacgcaaccaggagtatgccgccaagatttttgagcaggtgatgcaggtacgagatgagctgggaaaggatgggagtaacaattacggctccctggctcacaggttgccggtgtttgtccgcacggcgggattggcgcaggcgctggcgttcgttgaggcccgggacggtgccgccgggaggaaattgctcagggatattgctgctgttgtcaacgaagaagaactgcttgctcgcagccgcacagcagaacttcctgaatatatgcttctcacacgcaacgtgctagcagcactggcctggtacaagcgattcgcccagtcagtgttgggtgtggaggcaggcgcggacagggagggggtgggcgaatga

SEQ ID NO: 606 - protein, 125 aa, Candidatus Desulforudis
MQTRNQEYAAKIFEQVMQVRDELGKDGSNNYGSLAHRLPVFVRTAGLAQALAFVEARDGAAGRKLLRDIAAVVNEEELLARSRTAELPEYMLLTRNVLAALAWYKRFAQSVLGVEAGADREGVGE

SEQ ID NO: 607 - DNA, 867 bp, Candidatus Desulforudis
atgacggtggaggcacgcttgctcttcgtgtacgcgctttcttctctgcacgcagggacggagcagggtgtgggggtgatcgatctcccagtggcccgcgaaaaggctacgggcctgccttaccttcctggctcttcccttaagggggtactgcgcgatgcctgtagggataatgaaatgcggaaaaaggttttcggtcccgatgccgatagcgcccacgagcatgccggctcagtccagatctcggaccagcggctgctcttgttgcccgtgcgtagccttaagggaacgtttgcgtgggttacatcaccctacattttgcgccgcttccttcgggatgcagaaaacgtaggggtttctagcataccttcgggtgtccctgtacccaccctggaaacttcctgccttgtatccaatgacggctctgcgattgtactgaacaaccaggtcatcctggaggatctggacctgaccgccgaaaccaatagcgatgcgcgcgagtgggcagagtggattgacagacaggttttcccggatgacaccagcgggcaggagatgctaaacgcgcgtttttgcgttgtgcatgacgacgtgatgagcttcctgcttgatactgcgacggaagtcttcgcccgcgtcaggctgcgcgaagacgcaaaaacggtggaaacaggcgggctctggtacgaagaggccctgccggcagagacggttcttgcggggctgatactcgcgaacccggttaaggcgaaaccagatgaggtgtttgaaacctttagcgggttaatggaaaagccgctgcagttaggtggcaaggcgacggtcggtcgcggcctgtgtcgccttcggatgatagggggaaattag

SEQ ID NO: 608 - protein, 288 aa, Candidatus Desulforudis
MTVEARLLFVYALSSLHAGTEQGVGVIDLPVAREKATGLPYLPGSSLKGVLRDACRDNEMRKKVFGPDADSAHEHAGSVQISDQRLLLLPVRSLKGTFAWVTSPYILRRFLRDAENVGVSSIPSGVPVPTLETSCLVSNDGSAIVLNNQVILEDLDLTAETNSDAREWAEWIDRQVFPDDTSGQEMLNARFCVVHDDVMSFLLDTATEVFARVRLREDAKTVETGGLWYEEALPAETVLAGLILANPVKAKPDEVFETFSGLMEKPLQLGGKATVGRGLCRLRMIGGN

SEQ ID NO: 609 - DNA, 1359 bp, Candidatus Desulforudis
atgagaagactaccaggagatgggaacggtagggaacctgtgccgccccctgtccagcctcagcttagccgacgggtgataggcagtcagatggtgccgctggtgacccaaatccgcagctacgaattgattacccccctgtttggtggcggtgtggagccgggagagaccgatccggtaacggtcatccggggcccggaaattcgggggcagctgcgtttctggtggcgcgcctgccggggcgggcgcttcaacggcgatctggcggcgatgaaagaggcggaggatgaactctggggggcagccagcacagagagaaaaccaatgccgtcccaagtggagattatgatctcgatcgaacaaagtggggagagcaagcacccgtttgaggttgtcgcgggtttggtagacgggcgtaaagaccaaccaaaaccgaaagttaaagcgaatgaaattgtagcccccgcttacgcggcatttcctttgcaaccgtcggaaaaggaaatgcgggccggcggtatcggcatgcaaactaaaacggtgcgcaccaaggtctgctttacgttgaagatcacgtatcccgaaaaacggcgagaggaggtagaagccgcgctctgggcctgggagacttttggcggcattggtgcccgcacgcggcgtggttttggggcgtcgaagctggttagtgttgacggcaagcccgttactccatccagggccaatgaggttgaagccaaaattcgcaaaggcctgcaaaagcacgtggtcagcgggacctggcctgccagcgtgccgcatctttccttgaatccgcgtatgaaagttacaggtaggcgttcggaccctatcgccgcctgggagtatctggtcaaatgcctccgagactttcgccagagccgctacccaggggcctctccaaggcagccggggcgcagccaatggcccgagccggatgaaatcagaagacttacagaccgtcgatgcgacaggcacgccaggtccctttcgacagtgaggaagttcccgcgggcggccttcgggttgccgattgtatttcatttcaaggacgagaagatcggtgacccatacgatactatactgcagggtcgagattacgagcgcctggccagcccccttatcttgcggccgttagcctgcgcggatggtgctgttggcctggcagtggttttagaaggaacgggtgtcacggtgctcccagacagcctgattcttagaaaaaaggaagaagtcgatataagctggccggtggaggcggcaatcgaggctcaagaggctcaagagttatcgccgctcaatgggatcccagatgtcttacaggcttttttaaagaaactctaa

SEQ ID NO: 610 - protein, 452 aa, Candidatus Desulforudis
MRRLPGDGNGREPVPPPVQPQLSRRVIGSQMVPLVTQIRSYELITPLFGGGVEPGETDPVTVIRGPEIRGQLRFWWRACRGGRFNGDLAAMKEAEDELWGAASTERKPMPSQVEIMISIEQSGESKHPFEVVAGLVDGRKDQPKPKVKANEIVAPAYAAFPLQPSEKEMRAGGIGMQTKTVRTKVCFTLKITYPEKRREEVEAALWAWETFGGIGARTRRGFGASKLVSVDGKPVTPSRANEVEAKIRKGLQKHVVSGTWPASVPHLSLNPRMKVTGRRSDPIAAWEYLVKCLRDFRQSRYPGASPRQPGRSQWPEPDEIRRLTDRRCDRHARSLSTVRKFPRAAFGLPIVFHFKDEKIGDPYDTILQGRDYERLASPLILRPLACADGAVGLAVVLEGTGVTVLPDSLILRKKEEVDISWPVEAAIEAQEAQELSPLNGIPDVLQAFLKKL

SEQ ID NO: 611 - DNA, 1176 bp, Candidatus Desulforudis
atgaccgtctggatcattgaaccccgcgatccccttattgcccgcgacggccgccccttcgggcctgtgcccggcgcgcgagcggaatcactagcctttccctttccttcgacaactacaggggctgtccgcacacgcaacgggctcgatgcgtcaggttgcttccagcccggggaggttccccgggtgaagcagattaatgtccgggggccgctgctggtggagttggatgctggcacgggggacgttacccgctggctggttccggcgcctgctgacgcgcttttactcgaacttaaatcagctgatactgccaaagcagaaatcaagcagcttgtccccttacagttaccgccgggagcaggcacaaaccttccagaggctatggcactggtaggcatgccccaccgggatccgcgtaagccatccaccaaagcaccgcaatattgggactgggactccttccaacagtggcttttaaatccccaagaacgtgatgaggtttctctatccgacctgggacatgacggtctggtgcgggaggcgcggatgcatgtaagtatacggccgaatacgcaaacagcagatgaagagcggggcgccctttttcaaacccggggtctggagtttattcatatgcctgaaaaacaggcgctttccaaggcgcggcggctggggctggcggtggctacggacgctcccagcctgaaaccagggattggtcctctgggcggcgaacggcgcctggtcttttggcggcgaagcaacgaaacgcttccatccctttccggagctctggaggagagaatcgctgccctgggccactgccgcctcatcctgctgacgccggcacacttcaaggcgggctggaaaccggcgtggctccttgaaggccgggaaggtgtgataccgtccttgcaggcggtggcgctcaagaggtgtcagactgtttctggctgggatttcgcgaagggcgagcgtaagcccacccgtcgcctggcgcctgcaggcacggtgtacttcctgaaacttgatggtgacagcgcggcggttaaaaggtggatagacaccatttggatgcactgtgtcagcgacgaggagcaggatcgccgcgacgggttcggtcttgccgttcttggggtgtgggacggcacatttcaccggatggaggtgtga

SEQ ID NO: 612 - protein, 391 aa, Candidatus Desulforudis
MTVWIIEPRDPLIARDGRPFGPVPGARAESLAFPFPSTTTGAVRTRNGLDASGCFQPGEVPRVKQINVRGPLLVELDAGTGDVTRWLVPAPADALLLELKSADTAKAEIKQLVPLQLPPGAGTNLPEAMALVGMPHRDPRKPSTKAPQYWDWDSFQQWLLNPQERDEVSLSDLGHDGLVREARMHVSIRPNTQTADEERGALFQTRGLEFIHMPEKQALSKARRLGLAVATDAPSLKPGIGPLGGERRLVFWRRSNETLPSLSGALEERIAALGHCRLILLTPAHFKAGWKPAWLLEGREGVIPSLQAVALKRCQTVSGWDFAKGERKPTRRLAPAGTVYFLKLDGDSAAVKRWIDTIWMHCVSDEEQDRRDGFGLAVLGVWDGTFHRMEV

SEQ ID NO: 613 - DNA, 1824 bp, Candidatus Desulforudis
atggctgagatgcaccttgtcgtttttcacattggaccggttcaggatttcatcgctaccgcgcggcgcagtcgcgatctttggtttggctcgtggttgttgagtgaactggcaaaggccgccgcgctggaaatcgtgcagcagaatgggaacgatatttcctgccttgtgtttccagcccctgataagttagagcagttgaagtctttcgacttcaacgcgcccaacaaagtcgtagcccgggtaaggtgcgatccggcggaattgcgcgagtccgtccgggaagccatactcaggcgcctttgcgaaatttgtgatgatgcctacaaaaagattaagggcgggtttgatcgtgaaattgctaagcggcaggtggaagactttcctgagttcttctgggcttcctacccctttaacggtaactacaaacaggcgcgtgacttcgccgaagccctcctgaacgcccggaaggtgacgcgcaacttcgcgcccattacgtggggaagccccgctcccaaatgttctctcgacgggtgccgggagtcggtcattaccgggagtgtatacagtcggatgaatgaaagccagctttatgaaaattaccgcgtgcagcgtggcgagtatctgtgcggggtatgtttattaaaacgtcacgggaggcgcggatcagaggagtattttttcagtacttcccacgtggctgctctccctttgctggaaaggctcaccaaccagcaccagcctcttgtggatgcatacatcggaaaattgaaggaacttggcatcacggcggatgccctgcaaacggtgtggctgcatcatcccgtatttggtccccatgacggccagttgttatttgaagagcgcctgcgcgaatttttcaaagaagaagaagaagggaaactgttgcaagccaaagaggcgctgcgcactttcctaaaacaagcctttgacagcaaaaagccgcttccttattacacgcttctcctcgccgacggtgatcacgtgggtaaagttattgatacccaggaaactcccgaaaagcaccaagaactttcccgttctcagagccgctttgccctagaggtccgagatatagtacagcaccaccagggttcgcttttatattccggtggcgatgatgtgctggctcttgtgcccctgcacacggtgctggcgtgcgcccgtagcctggctgagacgttccgccagcggtttgctggttttaaagcagaagatggcggaaaggaaatatcccttaccctttcggtcggcattgctgttgtccaccatcttgatcccctctctgatgcccttgagttggcgcggcgagcggaaaaagccgctaaatccgtaggtggcaaaaacgccttggcggtaacgctcagcaaacgaggtggggtggagcggaccgttaaagatacgtggggcgtcctggaccggcggctggaacggttcattgacctgcatcgagccgaagccgtacctgatggagccgcttacgaactacgcgacctggccaggcagctcgaggcgtcagatgaaaatttaaagagtacgcttcaaaaagcagcgtacgcagaggctaagcgtattttgcgccgcaagaaggcccggcgtggtactgagccaatagcggaagatattctcagtgagctagaggttttccttgacaaggataggttttctttcgaaaaacttaagcaactggctgacgaactcatcattgcccgagaatttgctgccgccatggatctgactaatatacccctgcctgtaccctcaaccggcgaggtgataaaaaatgaccgtctggatcattga

SEQ ID NO: 614 - protein, 607 aa, Candidatus Desulforudis
MAEMHLVVFHIGPVQDFIATARRSRDLWFGSWLLSELAKAAALEIVQQNGNDISCLVFPAPDKLEQLKSFDFNAPNKVVARVRCDPAELRESVREAILRRLCEICDDAYKKIKGGFDREIAKRQVEDFPEFFWASYPFNGNYKQARDFAEALLNARKVTRNFAPITWGSPAPKCSLDGCRESVITGSVYSRMNESQLYENYRVQRGEYLCGVCLLKRHGRRGSEEYFFSTSHVAALPLLERLTNQHQPLVDAYIGKLKELGITADALQTVWLHHPVFGPHDGQLLFEERLREFFKEEEEGKLLQAKEALRTFLKQAFDSKKPLPYYTLLLADGDHVGKVIDTQETPEKHQELSRSQSRFALEVRDIVQHHQGSLLYSGGDDVLALVPLHTVLACARSLAETFRQRFAGFKAEDGGKEISLTLSVGIAVVHHLDPLSDALELARRAEKAAKSVGGKNALAVTLSKRGGVERTVKDTWGVLDRRLERFIDLHRAEAVPDGAAYELRDLARQLEASDENLKSTLQKAAYAEAKRILRRKKARRGTEPIAEDILSELEVFLDKDRFSFEKLKQLADELIIAREFAAAMDLTNIPLPVPSTGEVIKNDRLDH

SEQ ID NO: 615 - DNA, 915 bp, Candidatus Desulforudis
gtgaatgaggctatttggcggcgcattaaaagatatgttgatcttggccgcgaagcgccaaaggtagagctcaaacaaaccttggacctttccacaagggagaagcaggcggagtttgtcaaggacgttacggccattgccaacaccccgggcggtaccggttacgttattatcggtgttttggacaacacaaaatgtccccgagatcggttcttgccagagaattacgtagtgggcttttcaccatcggatccggacgaactggagagacaaatgatagtggcactgagcaattattgcgatccggctccagaaatcgcgtttacccaagttttgcatccccaaactggccgcaacatcggcgtagtaacgatcgcccgctccgccgggagaccacataaattcattcgtgggagtactgggattgagcggcaggatgtattcatacgccgtggtaccgctacattcaaggcgtctcctcaagaaatcatcgaaatggcgcaagccccagcatttccagaagtcatcgcgattaatttcagtagccatccgcttaccagttttcagcaggaacaactcagggagagatttcatgtccacatagaagagttaattgaactgccggtccattttcttgctcaagaagacctaaagcctcaggcgaagaagtggattgaagaggtgggtctggctctggaggaatggtccgagaaaaatatagttcttattctgccaggccttgcccctggagccgcgactattttagccgctattcacggcctgcggggaggcttccccaagatcttgtgggtttatcaagctcccaacgaccgtacccagtacgaggttgcgcaagttgttgacttgcaagccttgcgcgacatgggaagggagatccgcagtagcgtcctgtga

SEQ ID NO: 616 - protein, 304 aa, Candidatus Desulforudis
MNEAIWRRIKRYVDLGREAPKVELKQTLDLSTREKQAEFVKDVTAIANTPGGTGYVIIGVLDNTKCPRDRFLPENYVVGFSPSDPDELERQMIVALSNYCDPAPEIAFTQVLHPQTGRNIGVVTIARSAGRPHKFIRGSTGIERQDVFIRRGTATFKASPQEIIEMAQAPAFPEVIAINFSSHPLTSFQQEQLRERFHVHIEELIELPVHFLAQEDLKPQAKKWIEEVGLALEEWSEKNIVLILPGLAPGAATILAAIHGLRGGFPKILWVYQAPNDRTQYEVAQVVDLQALRDMGREIRSSVL

SEQ ID NO: 617 - DNA, 381 bp, Candidatus Desulforudis
ttgattctccttaacttttcccatccccttactgcggagcagttgcaacaactggaagagcttgccgggagaaaggtggaccgggtggtcgagatcgacgcccagatcgacccccagcagcccatcgttccccaggtcgtgggcatggtggaccgggccggactcacaacggaggagtggcagacgttgcccattcttattaacccgccgtctctgaacttcagcgcggcgaccctcctggccgagctgcacgggcgttgtggctacttcctgccggtggtgcgcctccggccggtggccaacagcgtaccgccccgcttcgaggtggccgagatagtgaacctccaggcggtgcgggaaggagcacgggggaaaaggtag

SEQ ID NO: 618 - protein, 126 aa, Candidatus Desulforudis
MILLNFSHPLTAEQLQQLEELAGRKVDRVVEIDAQIDPQQPIVPQVVGMVDRAGLTTEEWQTLPILINPPSLNFSAATLLAELHGRCGYFLPVVRLRPVANSVPPRFEVAEIVNLQAVREGARGKR

SEQ ID NO: 619 - DNA, 846 bp, Candidatus Desulforudis
ttgatctgtaccctgggagtggaaccccaggtggtgaccattactcttgactgtctcctggctgaaggcgcgccggtggatgaggtagtagccgtccacaccgaggacgccggtgtccgggaggccctggcggtgctggaagaggagttctccggtgtaatctaccccagcgtgacgctgcgggcggttccggtgaccgtgcccggcggcccggtcgccgatttccggggcgaggatgagctgcgcggcctcctgcgcgctctttacaccgaggtccgccgggcgcgggagcaagggcgggttgtgcacctgtgtgtgtcgggcggccgcaaagtcatggggatcatggcggtggttgtcgctcagctccttttcggccccgaggaccgtgcctggcatctggtcaccgagggctggcggcccggcgctgagcgccgcctgcatctgccgccgggagagaaagtgtggctcgtgccggtcccggtactgcgctggagcgaagcggctacgctgatgcgtacggtggccgagctggatgatccggcggcggtcgtggaatggtacgagaaactgagccgcgaagcccgggaacggcggaagggggagttcatccgccgctggctgaccccggccgagcgggaggtagtccgcctggcctgcaaaggcttggataacgcggccatcgccagagccctcttcaagggggagcagaccgtggccaaccaactcggcgccgcctacgagaagctgagggagtggcttgagtaccctgagggcaacgtcgaccgctcccggctcatcgccgagttcgcgccttactttgttttcacggaggaagagggataa

SEQ ID NO: 620 - protein, 281 aa, Candidatus Desulforudis
MICTLGVEPQVVTITLDCLLAEGAPVDEVVAVHTEDAGVREALAVLEEEFSGVIYPSVTLRAVPVTVPGGPVADFRGEDELRGLLRALYTEVRRAREQGRVVHLCVSGGRKVMGIMAVVVAQLLFGPEDRAWHLVTEGWRPGAERRLHLPPGEKVWLVPVPVLRWSEAATLMRTVAELDDPAAVVEWYEKLSREARERRKGEFIRRWLTPAEREVVRLACKGLDNAAIARALFKGEQTVANQLGAAYEKLREWLEYPEGNVDRSRLIAEFAPYFVFTEEEG

SEQ ID NO: 621 - DNA, 46 bp, Chloroflexus aurantiacus
taatacggcaacctttgacataccaggacggcgtgtctggtaaaga

SEQ ID NO: 622 - DNA, 1203 bp, Chloroflexus aurantiacus
atgtggctgaagattaagccaaataaccctctcatattaggtgatgtacgggccagctctcagtttttgagtccaactcagtacattccaggccggatactgcggggtgcatgggctgaatggctcctgatccagggtcggcaggatattttgcccactgtgcaacgtgtgcgtattggaaactttttccccacaacagaatggcgtccaatatgttacgcccttccgttaccactcagtgctctaacatgcaaacaggcaagtggcttcaaaaaggaaccacatcccgacaatcagggccatggggttgtggatgcccttatacctcaactggcatactctcttcttgaaagagccggggcctgttttgccgcgccgttcgttctaacatgtctcacatgtggcagccgtatggaagcgataacggggttttacacagtctaccgtgacggtaccactgaacgctactgccaatcacggctacgttaccactcacagacaaaagtggggatcagtcgataccgacgcgctgccgtagaacaggtgctgtacacggcgaacgccttaagtccggtaacggttcaaccagatgaaaaggtgtccgacttggtctttctgggacgcatatatggtgagcgatcagatgtggcagaccttatagaggccattaatcacatcgcgattggtgcccttcacacgcgaggttatggtcgtgtaaaagctgaggaagctgaggtggtaggttttcccgatatcgaggagcgagtaaggcttttcaatgagatactggttcattgctggcaagatctgaaatctttggctaccaacgctgaagatcttcctgcaaagccagaaggcacatacttctctgtagacttgttaagtcctggcgtattccaggatagcggtatacctgctttggcaccaatcctgcgtatcaacggacaggcactggaaccagtctggtggatgacgcgccctgattttgccggtggttggtctaccgcctggggtttgcccaaaccgaccaacttggctgcccgtatgggtagtgtttacgtgtaccgctgggatggaacgttggatgagatcatctctactctacaaactttggaggaacagggagtcggcaagcgacgagatgaaggctttggcgagtttctggtttgtcatccattccatcaggaggtagaagagaaatga

SEQ ID NO: 623 - protein, 400 aa, Chloroflexus aurantiacus
MWLKIKPNNPLILGDVRASSQFLSPTQYIPGRILRGAWAEWLLIQGRQDILPTVQRVRIGNFFPTTEWRPICYALPLPLSALTCKQASGFKKEPHPDNQGHGVVDALIPQLAYSLLERAGACFAAPFVLTCLTCGSRMEAITGFYTVYRDGTTERYCQSRLRYHSQTKVGISRYRRAAVEQVLYTANALSPVTVQPDEKVSDLVFLGRIYGERSDVADLIEAINHIAIGALHTRGYGRVKAEEAEVVGFPDIEERVRLFNEILVHCWQDLKSLATNAEDLPAKPEGTYFSVDLLSPGVFQDSGIPALAPILRINGQALEPVWWMTRPDFAGGWSTAWGLPKPTNLAARMGSVYVYRWDGTLDEIISTLQTLEEQGVGKRRDEGFGEFLVCHPFHQEVEEK

SEQ ID NO: 624 - DNA, 456 bp, Chloroflexus aurantiacus
atgagaaagtttaccgataatcccaggaagaatgctcatatcttgcgcgagatagatcgcagagaggagaagttagtccagatgtctagagatttggcagacaaactggctcagatctttgagaatgtagaaaaaaaacctcttagcgacaaagaccacaaagagcgacaactccgtaatatccaggctgttgctgaacagagtccctcctggctgccagtagaactctttatccgctatcaggcagcccggaaggaaatctacattgaatgggcggaggaggcgaacagccttctggatagtctcagaagcgaagctcaatcgattgtgggtaccgacaattctcagttagttggcgatgtacacatggaactggtgcggcgcacgcttggctatacagtgcgctggcacgtctgggatgctaagggaacgactcagcgagaggttaagcaatga

SEQ ID NO: 625 - protein, 151 aa, Chloroflexus aurantiacus
MRKFTDNPRKNAHILREIDRREEKLVQMSRDLADKLAQIFENVEKKPLSDKDHKERQLRNIQAVAEQSPSWLPVELFIRYQAARKEIYIEWAEEANSLLDSLRSEAQSIVGTDNSQLVGDVHMELVRRTLGYTVRWHVWDAKGTTQREVKQ

SEQ ID NO: 626 - DNA, 807 bp, Chloroflexus aurantiacus
atgagtgtcttcgcaacattcgctagtcagaccagaatccaggcaattctggtaatgcagacggctttgtctgtgagcagccgcctctctctggagccaactggtactgacatgcctgtgatcaaaggaccggatggtctgcccttcattcccggctcttccattaagggcgtggtgcgtttccaggtggaacgaatcctgcgcacctgggatcgtagaccagatttttgggcatgtgatccttttgacgccccatgcattccggctaagaagaaggaacagctcctgaacgacgcggaaacagaccagtccttcgccgagactgtctggaaagagagttgcaccgcctgtcgtcttttcggatctccctggtttgctggacgggttgctttcagggatgcgtatttgcttaacccagaagacctgccaacgctcactcagatccgtgacggcgtgggtattgatcgagatctgggcacagctcgttcaggtatcaagtacgattttgagactgtgattcccggggcgcgcttcggtctggagatcctggccgagaacctggaagagtgggaaattggttttctcctcacagtcttgcggctttgggaggagggtggtattgcaattggtggtaagactacccgcggtccgggctggggaaaacttcaagaaatcaagatacagcgagtaggtatcagcaatttgatggactatctgctagagcgcaagtcgagtgaggtggctgcgacgcagtttctgcaaacgttccgcgagtggctgaaggaaaggggggcaggcgatgcataa

SEQ ID NO: 627 - protein, 268 aa, Chloroflexus aurantiacus
MSVFATFASQTRIQAILVMQTALSVSSRLSLEPTGTDMPVIKGPDGLPFIPGSSIKGVVRFQVERILRTWDRRPDFWACDPFDAPCIPAKKKEQLLNDAETDQSFAETVWKESCTACRLFGSPWFAGRVAFRDAYLLNPEDLPTLTQIRDGVGIDRDLGTARSGIKYDFETVIPGARFGLEILAENLEEWEIGFLLTVLRLWEEGGIAIGGKTTRGPGWGKLQEIKIQRVGISNLMDYLLERKSSEVAATQFLQTFREWLKERGAGDA

SEQ ID NO: 628 - DNA, 885 bp, Chloroflexus aurantiacus
atgcataagacacgatataacgctctcagtgtagccttccagatcagtccccgcggtcctttactgatcaaagctggtggcatttctgctaaccctacattgccagatatgcagtttgtgcgcacatatcatcctgagaaaggcgagacagtctacattcccggctcgtccctcaagggggtagtacgtgggtttgtagagaaggcactacgtactcttgatgaccacacgtcctggcagtgggcctgccccacctttcctgatgaagatgaaagctgcgctaaaaaactcgggaaagaagaaaacagcgccacgatttacaaaaactcctgtggtgcctgtcgcctcttcggccatacccgtctgaaaggtcgtgttgccttcactgacctgctgcccgtggatgaagtcaagaccgagatccgctacggagttgctatctcccggctgagccatgctgtagctcatggcccatttgagatggaagtagccgttgctggtacctttgaagggtacctgattttggaaaattttgaactttggcaactgggattacttgtcctggcattccagggtatgaacagtggcctgctccaaattggctttggcaaaaaccgggggtttggtgaggtggccgttcaagtgcaggaagctcgcctggacgaagtcacctctggcatggagatcggactctggcgaggattggcagacttcgtaagtgacgaggagaagacaagatacggtctcagcactaccttcaccctaaacggaatgcctgatcctctacgaaccgaacccctcgggctgtatactcgtcgtatctacgatcctaaaagatgggatgaggttgctcaaagagtaacagacaagctaggcactacgtga

SEQ ID NO: 629 - protein, 294 aa, Chloroflexus aurantiacus
MHKTRYNALSVAFQISPRGPLLIKAGGISANPTLPDMQFVRTYHPEKGETVYIPGSSLKGVVRGFVEKALRTLDDHTSWQWACPTFPDEDESCAKKLGKEENSATIYKNSCGACRLFGHTRLKGRVAFTDLLPVDEVKTEIRYGVAISRLSHAVAHGPFEMEVAVAGTFEGYLILENFELWQLGLLVLAFQGMNSGLLQIGFGKNRGFGEVAVQVQEARLDEVTSGMEIGLWRGLADFVSDEEKTRYGLSTTFTLNGMPDPLRTEPLGLYTRRIYDPKRWDEVAQRVTDKLGTT

SEQ ID NO: 630 - DNA, 37 bp, Deinococcus geothermalis
gttgcagccgtctttcggggcggctgaggattgaaac

SEQ ID NO: 631 - DNA, 1041 bp, Deinococcus geothermalis
atgagccagtgcctgatttcgacggtgggcaccagcttgctgggcaacgccaacaatccccgcgtcaatcccgacggcctaggccccgccgagctgctgcggcgcgatccgcagcgggccagcgccgaggccaacgccctcacccggctggccacacccggcgacacgctggtgtttctgcattccgataccgaggacggcgaacgctgcgccggatacctggccgagtacttcgccgaactcggctacccggtgcgctgcgagcgcatcgcgggcctgagttaccacgaacggggctttgtgtcgcacgggctgcgctcgctggtgcggctgctcgccggagaaatccgcgctgcacgccgggccgggcagcaaccgctcctcaacgcgacgggcggcttcaaggccgaaatcgcctatgctaccgccgtgggcctgatgtttggggttccggtgtgctacatccacgagcgcttcggggacgtggtgacgctgcccgcctccccggtggggtgggactacagcctgttcacctggtaccgcgactttttcgagtggatagacgaagaaccgcgccccaccgcgcaggtgcgagagcgcctcatggccctccccgacagcgtcgcgctgctcgttgaggatgcccccgacggccacagctacctctcgccgctgggcgaagcgtacctcgaagccttccggggccagcccgacacccggcgaccgctgcggctctcgccctcggccctgcggaccctcgacaccctggacttcagcacccgcagcgcctacctggggctgctggagcggttgcgccagggccaagaccgcgagtggcagcgcagcaccgagacactctctgggggcgttctgaaatttcctaagggccacagcgtccaccgcgccttttttgtggaacgcgagggcatgctgcacgtccttgagctgtgtggtcatgacaacgaacggcgctaccagcacttgatgcaaaccatccgctggagccaatacgaatcccacaccttccaagatttgccctaa

SEQ ID NO: 632 - protein, 346 aa, Deinococcus geothermalis
MSQCLISTVGTSLLGNANNPRVNPDGLGPAELLRRDPQRASAEANALTRLATPGDTLVFLHSDTEDGERCAGYLAEYFAELGYPVRCERIAGLSYHERGFVSHGLRSLVRLLAGEIRAARRAGQQPLLNATGGFKAEIAYATAVGLMFGVPVCYIHERFGDVVTLPASPVGWDYSLFTWYRDFFEWIDEEPRPTAQVRERLMALPDSVALLVEDAPDGHSYLSPLGEAYLEAFRGQPDTRRPLRLSPSALRTLDTLDFSTRSAYLGLLERLRQGQDREWQRSTETLSGGVLKFPKGHSVHRAFFVEREGMLHVLELCGHDNERRYQHLMQTIRWSQYESHTFQDLP

SEQ ID NO: 633 - DNA, 1188 bp, Deinococcus geothermalis
atgaacaccgtcatcctttccgcgctgggcaccggggcataccgcgaagcccgctatcagtccgagcatcactctgacatcatcaccaccggtctctttgcggtggcgctgcaccgctggtacccgcaagccgaggtgaagttgctcgccaccgacgcggcttgggacagcgcgaacggggactatgtgaaaaagcaccaccccgacttcgagcgggtccgcatcccggagggccgcaccgaggccgaagcctgggaactgttcggggcgatgacggacgcggtgccgccgggtagccgggtcatcttcgacatcacgcacggcctgcgctccctgcccatgctgggttttctggcgctgtcgtacctgcgggtggtgcggaacgtcaccatcgaacgggtgtactacggcgcattggagctgacgccgcgcgaggaaggggcgctaacgccggtcgtggacctcacgccgctcgtccgtttgctcgactgggcgcaggccgccaagcgctttcaggacacgggagacgccagcctgttcacgggacttctgcgggtcaggggaccgggcaacttgaacagtgtggctgactgcctcggacaactgtccaccgcgcttgccagtaaccgcacagtcgaggtcggagagctttccggcgtgctgctggaaaagctaggccgctgggagcaggaaaataccctcgcgcagcaccgccctttcttgcaggtggccgatacgatcaaagccactatgcagccgctgcaagcgagagaagacgagcggctcaacctcctctcgcaccacgcccagattgcttggtaccgcgagcggggccactgggtacaggcggtcggtctggcccgcgagtggctggtgtcggtgctgacctggcaacaaacggacaccttgcagctcaagcgcaagcatcgcgaggacgccgaacggttgctgggtcaatacgctaagaccccccaagcggcccctgccgagttgcaagcggcggcggcgctctgggacgaacttaccgacctgcgcaacgatctcgcccatttcggtatgcgcgaagacagccggaccaggagtaccaagctcaaggaaaaagtcaatcatctcctcgacaagctccccgacgccgtgcggcccctgggcctggacctggaggatgccgcgctggaaaggccagcatga

SEQ ID NO: 634 - protein, 395 aa, Deinococcus geothermalis
MNTVILSALGTGAYREARYQSEHHSDIITTGLFAVALHRWYPQAEVKLLATDAAWDSANGDYVKKHHPDFERVRIPEGRTEAEAWELFGAMTDAVPPGSRVIFDITHGLRSLPMLGFLALSYLRVVRNVTIERVYYGALELTPREEGALTPVVDLTPLVRLLDWAQAAKRFQDTGDASLFTGLLRVRGPGNLNSVADCLGQLSTALASNRTVEVGELSGVLLEKLGRWEQENTLAQHRPFLQVADTIKATMQPLQAREDERLNLLSHHAQIAWYRERGHWVQAVGLAREWLVSVLTWQQTDTLQLKRKHREDAERLLGQYAKTPQAAPAELQAAAALWDELTDLRNDLAHFGMREDSRTRSTKLKEKVNHLLDKLPDAVRPLGLDLEDAALERPA

SEQ ID NO: 635 - DNA, 1029 bp, Deinococcus geothermalis
atgaggctgccgggacagtttcccgtcaggggagccagccacgccgggcacgcgctgacccggcgggtggccgtgaagcagagcaagaccagcgagggccgcagcaaggacgaggaaaaggacgaagtgcggttgcgggaagacctgaaagccgtcgcccgcatccccgcgccccccgtgtatgcggcggccttcaagcgctggcaagacgccctctccgatgccgtccgcctggaggctaccacccgcgggccgctcgcggtcggtctgggcaaccccagcccctatgaagtgggcctcaccctgcaccacacctacggggtgcccttcctgccggggagtgcgctcaaggggttggcgctgcgggcggcgtggcgaaatggggtgccggcagacgtggtccgggccatcttcggggacacgacctcggcgggcttcgtgaccttttgggacggctggctggtgccgggacagaccgagctgctccagctcgacaccattaccgtgcaccacccgcagtactacggcgacgggagcgagtggcccaccgacttcgacgaccccaacccggtggccttgctcagcgtgcgccccggcctgcgctttgagctgcgcgtgggcgggccgccggagcacgccgcctacgccgcgcggctgctcgaatggggcctgacccacctgggcctgggcggcaagacgaacgccgggtacgggggctttcgggtagagcgggaaaagtcggaggctgagcgggaagccgagcgcctcgccgccgaggccgcagaagaggcgaagcggtccgagggccgtgcccacacggtgcgccagcacatcgcggggatgaacctcagacccgacaaggtcaaaagcgagctgccgaagctgctgaagcaaatcgacgaactgccgccccccctgcgccgcgagacggcccagctcttgctggagcgcctgcaaggggacaaccgcaccaagggtgacaaggccctgctcaagatggtgcgggcgcgactggaggactgcgaatga

SEQ ID NO: 636 - protein, 342 aa, Deinococcus geothermalis
MRLPGQFPVRGASHAGHALTRRVAVKQSKTSEGRSKDEEKDEVRLREDLKAVARIPAPPVYAAAFKRWQDALSDAVRLEATTRGPLAVGLGNPSPYEVGLTLHHTYGVPFLPGSALKGLALRAAWRNGVPADVVRAIFGDTTSAGFVTFWDGWLVPGQTELLQLDTITVHHPQYYGDGSEWPTDFDDPNPVALLSVRPGLRFELRVGGPPEHAAYAARLLEWGLTHLGLGGKTNAGYGGFRVEREKSEAEREAERLAAEAAEEAKRSEGRAHTVRQHIAGMNLRPDKVKSELPKLLKQIDELPPPLRRETAQLLLERLQGDNRTKGDKALLKMVRARLEDCE

SEQ ID NO: 637 - DNA, 513 bp, Deinococcus geothermalis
gtgaccggctttgacccctttgcggcagcgctgaacaacatgaccgctgccaagacgccgagcgcgggtgcggagcagcgccccctcacccgcgcccaggctgacctgaagcaggcggtggaactgctggaggcgatggcgggagccagcgaaggcgtcaagcgcaattacctgcgccgcgtgaaggacttccccgcgctcgtgatgcaagtgggcctggcgcaggcggtggcctttagcgtggacaaggcgggcaagaatgacgaccggggcggggcacaccgcctgctgctcaaccatctgtacgcggtgtggcggccagagacccagggccaacccgtgcagctcgatgatggcaagggccgcgaacacgtgctgaagtttctgcaagacctctccaccgccgagtaccgccacctcacccgccgcaccctggcggcctgggtgtacttccgccgcctgagcgagagcgtcctggatcccgacggcaccctgggcgaggagcgcgaatga

SEQ ID NO: 638 - protein, 170 aa, Deinococcus geothermalis
MTGFDPFAAALNNMTAAKTPSAGAEQRPLTRAQADLKQAVELLEAMAGASEGVKRNYLRRVKDFPALVMQVGLAQAVAFSVDKAGKNDDRGGAHRLLLNHLYAVWRPETQGQPVQLDDGKGREHVLKFLQDLSTAEYRHLTRRTLAAWVYFRRLSESVLDPDGTLGEERE

SEQ ID NO: 639 - DNA, 795 bp, Deinococcus geothermalis
atgaacgcaaatgcagaactgttgatgtggcaggccctcaccccggtgcacagcggcaccggccaaagcagcgcgggcgtgattgacctgcccatcgcccgcgagggggcgaccggtttcccgatgctgcccggaagttccatcaagggcgtgctgcggcagggccgcgaggatgaggaggccaagcggctgttcggctcgctcgacgccgccgggcggctcaccttcaccgatgcccgcttgctgtgcctgccggtgcgctcgtaccggggcaccttcgcctacgtgacctgcccgctcgtgctttcccgtctgcggcgcgacctggcggcgctggggcacccgctggcgctgccagaagtcccggaagtcaaagagaacaccgcccaggtcgccggggacacgctgatgcacggcgggcaggtgctgctcgaagacctggaccttcaggccgaagagacggcctccgcgcgggcgtgggccgaggccttggcagaactcagcggcctgggcgacgagctgcgcgagcgcttcgccctcctgagcgatgacgagttcggcttcctcgccgagaccgccaccgaggtgacggcccacatccgcctggacgccgagaccaagacggtcgcgggcggggcgctgtggtacgaggaagccctgcccgccgccagtctgctcaccagtttcctgctgcggccccaggacgtgacctttgcgccgccctcatcgctgcaactcggcgggaagggcagcgtggggcgcggcctgctgagcgtgcaggtggtggtccggtga

SEQ ID NO: 640 - protein, 264 aa, Deinococcus geothermalis
MNANAELLMWQALTPVHSGTGQSSAGVIDLPIAREGATGFPMLPGSSIKGVLRQGREDEEAKRLFGSLDAAGRLTFTDARLLCLPVRSYRGTFAYVTCPLVLSRLRRDLAALGHPLALPEVPEVKENTAQVAGDTLMHGGQVLLEDLDLQAEETASARAWAEALAELSGLGDELRERFALLSDDEFGFLAETATEVTAHIRLDAETKTVAGGALWYEEALPAASLLTSFLLRPQDVTFAPPSSLQLGGKGSVGRGLLSVQVVVR

SEQ ID NO: 641 - DNA, 1185 bp, Deinococcus geothermalis
gtgagtgacaccatcctcgaactgcaacccctcgcgccgttgctgctgcgcgacgggcggccctttgcgggcggcggcgaagaatcgcgcgcccagagcctcccgctgccgctgccgcacaccctggcgggcttcatccgcacccagctcggcgagggccggggcctgaagtggcgcaacctcagcgacgacgcgctgcgccgcgagctgcaggccctgcacaacacccccattcgggcgctcctccggcgggacgaaacgtttatgttcccggccccgctcaatgcggtggtggacaagaacgggcagatcttccgcgccctgcccgccgagctgagggagggcgagggcaccgacgccccggagggcctgcgcccgctgctgctgaccgaccgcgacggcaacgcgcccggcgacgccttcaagccgcagggcgactaccgctactggccccaggacgccatgcagacctggctgctgggcggcattcctgagaggctggaacgggtcgaaggcccgcccaccgacgagcgcacccacgtcgccatgaacagcgaaaccggcaccggcgacgagggcaagctcttcaccgtgagctaccgcgccttcgaggagcgccgcgaaggtacgtaccatcgctggaccctgcgggtgaaaaccgacctccagggtcacatcgctccgctggggcacctgggcggcgagcggcggcccgtcgccctgcgcgactgcggcaaccaggggcagtggcccaatctgagcaccttcggcgagctgaaagcggcgctggcagacccgaacagtacccgcctgtgctttgtcctcaccagcccggcgctgtttgccggcggctggaaaccgggctggctctcgctgacgccggaagaggtgcagggacacagcggagcggggctgcccgccggggtgcgcgagctgatggcgggcggggcgcggctggtgggggccgcggtgggccgccgcgtgccggtgagcggctggaacctgcgcgagaacaagcccaagccggtgcgctgggcggtgcccgccgggagcgtgtacttcctggaggtgccccacgccttcaatcgccagaagctgctggaagcctggctcaagcccctcagcgacgaccaagaggaccagcgcgacggcttcggctgcgcgctgtggggagtgtggaactga

SEQ ID NO: 642 - protein, 394 aa, Deinococcus geothermalis
MSDTILELQPLAPLLLRDGRPFAGGGEESRAQSLPLPLPHTLAGFIRTQLGEGRGLKWRNLSDDALRRELQALHNTPIRALLRRDETFMFPAPLNAVVDKNGQIFRALPAELREGEGTDAPEGLRPLLLTDRDGNAPGDAFKPQGDYRYWPQDAMQTWLLGGIPERLERVEGPPTDERTHVAMNSETGTGDEGKLFTVSYRAFEERREGTYHRWTLRVKTDLQGHIAPLGHLGGERRPVALRDCGNQGQWPNLSTFGELKAALADPNSTRLCFVLTSPALFAGGWKPGWLSLTPEEVQGHSGAGLPAGVRELMAGGARLVGAAVGRRVPVSGWNLRENKPKPVRWAVPAGSVYFLEVPHAFNRQKLLEAWLKPLSDDQEDQRDGFGCALWGVWN

SEQ ID NO: 643 - DNA, 1434 bp, Deinococcus geothermalis
gtgacccgccatctcctttctctctccctcggcccggtgcaggagttcatcgccgcggcccgcaaaaccgccgacctggaagctgggtccaccctgctggtcgaactggtgggcgcggcggcaagcgagttttccgccgaggaacgcatctatcccgccagcgtcgaagcgggcggcgcgaacaagattctggcggtggtcacgggcgacccggcccagcacgcgcggcgggccagggcgcgggcgcaggcagagctggaagcgcagtgggagctgtacagccgcccgctggccgcgcacattgacgaggcgcgggcgcgggcacaactcgcgcacttcctggagttttatgccgcctgggtgccgctgcggagtgagggcgactatccggcggcccgccggcgggtcgaggcgctgctcgccgcccgcaaagccctgcgcgacttcgcgccgctggcgcagggggacgcgagacttcccaagtcgccgctcgacccggcctacgcgacggtactgcgggtagacgaccgcggccagctgccggaagcgctgcaaggggaaccctggaacttcaagcccaccgagaccctcgatgccatttcgctgctcaagcggctgcggggacgggcgcagcgggacgtgctcgataccccgaccctcgcgcaccgcgcccaataccccggcacggtcttgcagcgctccgccgacaaggacccacaacccgcttctgcctactacgccatcctggtggccgacggcgacagcatgggggcactgctctcggcccacgacagcgaggccgcccaccacgagctttcgcggcggctcgacgagtttgcgcggcaggcccggcgcatcgtgcagaaacacgacggccaagcggtgttcgcgggcggggacgacgtactcgccttcctgccggtgacgacggcgctggcctgcgggcgcgagctggcggagaagttccggcacaccgtgcgcgccaccctcagcgcgggcatcgccgtcgtgcactaccgcgagccgctgagcacctcattgcggcaggcccgcgaagcggaaaaggtggcgaagaaggtcgacggcaagaacgctgtgtgcgtcgccgttcacacccgtggcggtgccccgcggcgggtggcacagaagtgggacggcacacgggcgctcgaagaactcacccgcatgcggctgccccgtggcctgccgtacgaactgagcgagctggcccgcgagtggccgcacggcgtgtcgcccgtggccctcagcaacgaggcccggcgcatcgcccggcgcaaggccaccgccgacggcgcacggctggacgaaagcgtcttgcgaggctggcagtttgacagccctgagcacctgcgcgagttcgccaacctgctcatcatcgcccgctttctgagcggccaaggagaccgagcgtga

SEQ ID NO: 644 - protein, 477 aa, Deinococcus geothermalis
MTRHLLSLSLGPVQEFIAAARKTADLEAGSTLLVELVGAAASEFSAEERIYPASVEAGGANKILAVVTGDPAQHARRARARAQAELEAQWELYSRPLAAHIDEARARAQLAHFLEFYAAWVPLRSEGDYPAARRRVEALLAARKALRDFAPLAQGDARLPKSPLDPAYATVLRVDDRGQLPEALQGEPWNFKPTETLDAISLLKRLRGRAQRDVLDTPTLAHRAQYPGTVLQRSADKDPQPASAYYAILVADGDSMGALLSAHDSEAAHHELSRRLDEFARQARRIVQKHDGQAVFAGGDDVLAFLPVTTALACGRELAEKFRHTVRATLSAGIAVVHYREPLSTSLRQAREAEKVAKKVDGKNAVCVAVHTRGGAPRRVAQKWDGTRALEELTRMRLPRGLPYELSELAREWPHGVSPVALSNEARRIARRKATADGARLDESVLRGWQFDSPEHLREFANLLIIARFLSGQGDRA

SEQ ID NO: 645 - DNA, 1209 bp, Deinococcus geothermalis
atgcccagaaccccaccccccctccccaccgacctgcccgacctctctcctcccgaacagctcaccgtccagttgcggaccatcactcccatgttcggtgggagtgccgagacccgcgaggtggacgagcgtcaccccgtgcgtgcggccagcgtgcgcggccacctgcggttttggtggcgggccaccgctggggccgggtacgccacagcaaaggagctgcacaaagccgagtcggggctgtggggcaacaccgagaagccggggcgggtgcgggtggaggtggaggtgacggagcggggcacgcgcgtttacccctccgaactgaacaaggggggcgacagccccgccaagaccgggcctcgcgaagcgtacttcgtgcatccttttcaggagattcgctccgaaaacaagccggaaaccttcggcctcagggacgtcgccttcaccgtaaccctcaccctgcataggctgagcgccgccgagcgtgagcaggtcatcacggcgctgcgggcctggattgcctttgggggcgtgggtgcccgcacccgccggggttgcggtgccctcaccgtcgccggggacgcggctcagtggctgcccgcccagcccgccgacttgtgggcgtggtttggccgcgaggaacgcgcggtgcccacgccgcaacacagtgttctggctggagccaaagcgctgctcggcccggtgggtgccgacccggtgaagggggtatggcgcgacctaggccgcttctgggcacggtttcgcaaggggcactacaccgagcgccgccctgcttacagccccatgagcggcggcgcgtggcgcgaccaccgcacccttcaggcggggctgcggcgcgacgaacccgctcggctcgccaagccctttctcggcctgcccatcgtgtaccagaagtttcccaagacggacgccttcgcgggcaccatcgagggcgcgcaggagggcaaaaagcgcatggcgtccccggtcatcctcaagccctgcgcctttcgcgacggggtgcgggggctggtgctcgtcctgaacgcgccccccccgcgccaggtcaaggtgtcgggacagccgcatcccctggagattccgccccatgaccccgtgctggcagcgctgggggtgcgcggcccgctggctgccgttcgcgccgctgccaaggtggacggctactccgaggaggtctccctgtga

SEQ ID NO: 646 - protein, 402 aa, Deinococcus geothermalis
MPRTPPPLPTDLPDLSPPEQLTVQLRTITPMFGGSAETREVDERHPVRAASVRGHLRFWWRATAGAGYATAKELHKAESGLWGNTEKPGRVRVEVEVTERGTRVYPSELNKGGDSPAKTGPREAYFVHPFQEIRSENKPETFGLRDVAFTVTLTLHRLSAAEREQVITALRAWIAFGGVGARTRRGCGALTVAGDAAQWLPAQPADLWAWFGREERAVPTPQHSVLAGAKALLGPVGADPVKGVWRDLGRFWARFRKGHYTERRPAYSPMSGGAWRDHRTLQAGLRRDEPARLAKPFLGLPIVYQKFPKTDAFAGTIEGAQEGKKRMASPVILKPCAFRDGVRGLVLVLNAPPPRQVKVSGQPHPLEIPPHDPVLAALGVRGPLAAVRAAAKVDGYSEEVSL

SEQ ID NO: 647 - DNA, 25 bp, Hyperthermus butylicus
gaacaactcaaaagagaattgcaag

SEQ ID NO: 648 - DNA, 1407 bp, Hyperthermus butylicus
atgagaggcgaaatcctagcggtcgccccatggggggatcctgcgggttggacctacacaaggtaccgacttaaagctggcggaaaaactgttgaggtagaatctttcaccgggctggcagcagtagccaaggcttaccctgaagcccgcatactgatagtggccgccgacaccctagcagaccccgccttcacccttacaggctacgaggacgttatagactctgctaggaggtatgtgaagaattacctctgccagctccaaggcaaggctgaggtacacatactcccaggagtgatagcccagaagcaccgggtcttcaggggcaagccgacagactactattacaagctcctagacaccctcataaaaccagcatgggagggagaaaccgtcaaggcgatagtactagatttaacccacgggataaactacatgccctcaacagccctcaaagcagtcgaggaagttgcagccctacacgccctagcagcatcactaaaacactccaaagcagaaaccgtaaaggtcgaagtctacaatagcgaccccataatactcccagccgacgagcggaaaaaactggccagaaaccgccaatatccctgcaaaccagcagcaagcattgaaccccccacagcaaccatacacctcataatggcgaggcgctacacaacactagacctaatctcaaacatagacagtctaatcaacacagcagaaaagacgcccgtaaaaccgacaagcagagaatgcaccataggccgcgacgagaaacaagagcttgatgaagcagtagacgaggcacttaaactactcaaaatgttgagatacggcctcataccccaactagtttactacacagcaaaatacgctgcaaagctgctcgaaaaactcaaacaagcatacaacactacagagaagctatggcatgaaggaataaccgtaaagaagacaccggaaaaactagaggtcacaagatgccgccagctcacagaagcatataagacaatcctctacacctatacaatagcaaaaatccttgaggaagaactaatagacacaaccaccccaacactaaaccaggcggaaaagctcagagaaacactaagacacacggcaataatagaatccatacaaagcagggagataagcaagctcaaaaagaagctcaaagccaacctaatcccaacagagtggacacccctagcaacagtatatcaaatgcaacaacaggaatgcaaggacaaaagcatcctcacaagagacctactagcacacggaggctggcacacagacataatagaagtcaagaaacaagacaacacagtagcattcaaagtaaaagaagaatataaatgccaaaacaggaacatatggcaaataatagaagaactcggaacataa

SEQ ID NO: 649 - protein, 468 aa, Hyperthermus butylicus
MRGEILAVAPWGDPAGWTYTRYRLKAGGKTVEVESFTGLAAVAKAYPEARILIVAADTLADPAFTLTGYEDVIDSARRYVKNYLCQLQGKAEVHILPGVIAQKHRVFRGKPTDYYYKLLDTLIKPAWEGETVKAIVLDLTHGINYMPSTALKAVEEVAALHALAASLKHSKAETVKVEVYNSDPIILPADERKKLARNRQYPCKPAASIEPPTATIHLIMARRYTTLDLISNIDSLINTAEKTPVKPTSRECTIGRDEKQELDEAVDEALKLLKMLRYGLIPQLVYYTAKYAAKLLEKLKQAYNTTEKLWHEGITVKKTPEKLEVTRCRQLTEAYKTILYTYTIAKILEEELIDTTTPTLNQAEKLRETLRHTAIIESIQSREISKLKKKLKANLIPTEWTPLATVYQMQQQECKDKSILTRDLLAHGGWHTDIIEVKKQDNTVAFKVKEEYKCQNRNIWQIIEELGT

SEQ ID NO: 650 - DNA, 1023 bp, Hyperthermus butylicus
atggcgcaacaggctggtaatggtaggcctctggctggcttcctggttttgggctatgctgtgacacccctgcatcccggcgtgggcagggctcccggtgctgtcgaccttccagtccagcgtgaccccatgggctaccctatggtttacgcttcaagtgttaagggcgcgttgaaggctgagtgtgctaagcaggctggcgacaaatgcttcgacgataggggcaggataaaatgtaatgataaggatgaggactgcgcactgtgctgctgcctcttcggccacgagcctgaggcggcggaggccgcatcctccgtcctgagcgtgcttgacctagtgccgctcttcttcccggtgcccagcctgagccacggctacctctatattacgacaccttacctggcgagacgcgcatactcagttatggaggctataggcactagtggagagtacaacaagctcatgaaactgcttgagaacattgctaagcaggagctgggggagggcgaggctgcaggctgtgtagatgataggaaagtctatgttggcactgacgaactgaacgtaaagaaaaagctaggcaactgcgaagacctatcttttgtagccaagcttggaggcctggcgggcgacatacagtccaggatgatcgtcgtctctgacgctgtaggcccactctacgttgagaagggcctcattagggttacgagggtgcggctgagactcgacaccaaaaccgttgccgagggcgggctgtggactgaagagtacataccgcagggcacaatattcctcagcggcttcatagcagcactaccaaagaagaacacctactgcaaacatgttaacggtattgaaagcggtgtgattaaggatagtggagatcttaagaatctcattacgaagcttgccgaaaagctgaagaaaacaaacaacgttttctacgcgataatagggggcaaggagaccgtaggacggggcctcataaagttcaccatagctctacctcagggccaacagtaa

SEQ ID NO: 651 - protein, 340 aa, Hyperthermus butylicus
MAQQAGNGRPLAGFLVLGYAVTPLHPGVGRAPGAVDLPVQRDPMGYPMVYASSVKGALKAECAKQAGDKCFDDRGRIKCNDKDEDCALCCCLFGHEPEAAEAASSVLSVLDLVPLFFPVPSLSHGYLYITTPYLARRAYSVMEAIGTSGEYNKLMKLLENIAKQELGEGEAAGCVDDRKVYVGTDELNVKKKLGNCEDLSFVAKLGGLAGDIQSRMIVVSDAVGPLYVEKGLIRVTRVRLRLDTKTVAEGGLWTEEYIPQGTIFLSGFIAALPKKNTYCKHVNGIESGVIKDSGDLKNLITKLAEKLKKTNNVFYAIIGGKETVGRGLIKFTIALPQGQQ

SEQ ID NO: 652 - DNA, 525 bp, Hyperthermus butylicus
ttgagccgtaacatactgcccaacgacccggttgaagccgcgcttgaagccatgagaaggtttgacaagaacctccgagacgcatgcagcgacaagggcgagcctagggccgatgctatcagcaggaggctcaaggacttcccccagctgatacttcagtctggccttgtgcctgcgctaaccttctacctctccaagctcagcgagaaggctgatcaggatgcctacgagctaactgtcaaggtactgactgaacagaggttagagggggatgagaggaggaagttgtgcaggaagacttcgggggagggtggaggctaccctcacgtgctcgcactagtactggtctacgctgccgaaagagccggctgcagcgttgacagcatagccaggattggctccagccttgtcggctgcctggagacagtgcaaaagaagggtgtcactgtggagaagcttgtgcaggcctacgttaacgagctgaagaagctagcgtcggcactatacccggagaagaaaacatga

SEQ ID NO: 653 - protein, 174 aa, Hyperthermus butylicus
MSRNILPNDPVEAALEAMRRFDKNLRDACSDKGEPRADAISRRLKDFPQLILQSGLVPALTFYLSKLSEKADQDAYELTVKVLTEQRLEGDERRKLCRKTSGEGGGYPHVLALVLVYAAERAGCSVDSIARIGSSLVGCLETVQKKGVTVEKLVQAYVNELKKLASALYPEKKT

SEQ ID NO: 654 - DNA, 1713 bp, Hyperthermus butylicus
atgcccagcttcataagaccaaagcccctcgctacactcagctttgtgagctttacacctttatggcctggaggccccctcggaggccgcacctaccggtgtattaccaggagatactgtatcggccccttcctccccgactccaagcaggttatcgggagggtcagatggctccttagaaccgttgaggctaccctccaggtgttgactgggaagccagttaactcctacgcagatgtcgagtcgttgaatgctaggatattcgggaccacaagcacagcctcgaagctacgcatagtcctatcatactcgcccaacagcgtgagaagctactttgatgccagcaccgtgcaggccttggaagaggctgccaggagagcgagtctaaatgccaagagtatagtgcagctcatagaggttgacggttttacaaggctgagacacaagctgaatctgccaccttttgagaggagaatatggtcagactacgagcgttatctaaaggtgacaaggaatgggtcattagtacccgatgagttggctctactccttacaattccgcgtatacggcttacactacagggtataaaaaagttcattgacatatacgagatgcagcctttacgagaaggaatcgaactaactgtaaccatctatgcccgtaaaggagctaatgtcgattctctcgaggctagctttgcagtactcgttatagtgttcactctagccttcataggcttgggtaaggcaacatcaagaggttttggaaggtttgcccttaagaagtacgagattaatgtcaataataaagaccttgttgatgatgtgcttgaaagctttacaaaagtagtgaactctgttgaggatatgaagagtgtctacatggaggctggcaagacccttctaatgctcgctcgggagttgaaaggggtacctgtgccctcatcgaagatcgatgacgtggctggagaggatggatggcataaggcggttcagctggttaggaggagtagagtgcccctcttcgctacgagtatagcctacgtagcgcttaagggagctatagggaggataaagcatccctgcccctacgcaacagcagagctaggcggccggattgaaagccgtccccatggctgcatagataatactgtagaggtaggtgatattataactgctctaagtgctgtagggaaagccacacttaaatcgacatggaagttgtatcatggcccacagcagctcaggagggaaggggttgcatatcatacttggcctctaggtctaccgcgaggagcccaaaacacagggtattatattgctgagcacgcttatacaggtgaaaggtgcggccccaatctaggcaggattgccaagttgaataaatcctcgaggaggctttcaacagtattcttcacagtagcctgcagcggcggggaatgcttcggacttgtgcagcccttcctctcctacgaagactttgccgacgctatgaccaggcttgtgcatgtaggcaagcatgacaaaacactatatcacgtggtcagcgttgcccaggccttgcagcagagcaggctgggccatgggggatgcccgccggaccctgcggggcttgcagccccaagggacaccccaggcgcacgtactgcctccgatgttgttctcgagcctcttctcacggctctcgactggattgtcacgctgttagggtga

SEQ ID NO: 655 - protein, 570 aa, Hyperthermus butylicus
MPSFIRPKPLATLSFVSFTPLWPGGPLGGRTYRCITRRYCIGPFLPDSKQVIGRVRWLLRTVEATLQVLTGKPVNSYADVESLNARIFGTTSTASKLRIVLSYSPNSVRSYFDASTVQALEEAARRASLNAKSIVQLIEVDGFTRLRHKLNLPPFERRIWSDYERYLKVTRNGSLVPDELALLLTIPRIRLTLQGIKKFIDIYEMQPLREGIELTVTIYARKGANVDSLEASFAVLVIVFTLAFIGLGKATSRGFGRFALKKYEINVNNKDLVDDVLESFTKVVNSVEDMKSVYMEAGKTLLMLARELKGVPVPSSKIDDVAGEDGWHKAVQLVRRSRVPLFATSIAYVALKGAIGRIKHPCPYATAELGGRIESRPHGCIDNTVEVGDIITALSAVGKATLKSTWKLYHGPQQLRREGVAYHTWPLGLPRGAQNTGYYIAEHAYTGERCGPNLGRIAKLNKSSRRLSTVFFTVACSGGECFGLVQPFLSYEDFADAMTRLVHVGKHDKTLYHVVSVAQALQQSRLGHGGCPPDPAGLAAPRDTPGARTASDVVLEPLLTALDWIVTLLG

SEQ ID NO: 656 - DNA, 1044 bp, Hyperthermus butylicus
atggttgagacggcgccctgtaggaatatgatgctgtgtatcgcttggaagttcagcaagcttgtactggacacattgagtaggggtaggggtgctgaggagtttaaggggttgaaatctaagattctagaaatgactttgaacccgcatgagatcgatgttagtagtgtctgtcgctccatcgctagtataggtaaagtctactatgagcctctggttgaggggttggagaggcttggttactgtgtggtagacgttactgctaagacgaagtctaagcttattgtgggtgctagcagtggtcttctaggcacagtgctggaggttgggctctcctgggactacctgctagaccttccatacattcctgcgtcgagcattaaggggctgattaggagctggctagtccacacagtcctcagcaactacaagcttagcgagcaggataagaggcgttgtatcgagaggatactagccttaacgggtataggccgcgagccgttcacccgcgatgagaagagctgggctgtagagaagctgggctcagaggttgaccccaggaatactgtgccaagcgcgggcatggtcttcgttgctgacgcataccctgttgggcgtgggcggggcaaaactggctgtggcctcctcgactttgatgtagtaacaccccactactataggggcggcgagcctgtaagagacgagtttgaagcccagccgaacccggtaccgtatctcgttgtggctgagggtgttccattccggatagtggccgcagtaggcctcgtcgaagccgatatgctgagagatattaccagctgcataggcttaaatggtagtgttgatccttgtgggctgctcagcttcatactcctctcatcgctcgccgagggtgtaggcgctcgaaccggaaagggctacggcatcttcgaccttgaaagcgttgaggtgcacagggtgcagaggcccaccgttcagaggcgcaaaccgggcaggcttgtatggaagaagcgtgaaacaccccataagcgttcaaccacgtga

SEQ ID NO: 657 - protein, 347 aa, Hyperthermus butylicus
MVETAPCRNMMLCIAWKFSKLVLDTLSRGRGAEEFKGLKSKILEMTLNPHEIDVSSVCRSIASIGKVYYEPLVEGLERLGYCVVDVTAKTKSKLIVGASSGLLGTVLEVGLSWDYLLDLPYIPASSIKGLIRSWLVHTVLSNYKLSEQDKRRCIERILALTGIGREPFTRDEKSWAVEKLGSEVDPRNTVPSAGMVFVADAYPVGRGRGKTGCGLLDFDVVTPHYYRGGEPVRDEFEAQPNPVPYLVVAEGVPFRIVAAVGLVEADMLRDITSCIGLNGSVDPCGLLSFILLSSLAEGVGARTGKGYGIFDLESVEVHRVQRPTVQRRKPGRLVWKKRETPHKRSTT

SEQ ID NO: 658 - DNA, 3612 bp, Hyperthermus butylicus
atgtctaggcttcacatggtgaagcttgcagctctactccacgacccggcctggaagccctggattgtagcttcagcctttcccggcaaaacaggtactgtagggagagttctggccaaggttgcgggtaagtcggctcctgcaggtgagctggtgaaggtagaggagtgcgaagagcttatgaagaagatgaaaacatatactattgaagctgatgctcatcagcttgatgctgctgcggcggcagtagctatactggatggcttgcgcgacgccccgataattgagaagcttatcctggacgagaaaggagttgttgctgaggctgacaagcttgcggctagccttgaccgctgggtgctaacctataagcatagggaggctagagacgttaaggttgacgttggcgatgtggcttatgctaaccctctagacccgcggtttaagatgccagaatcgatgaggagtatagatgcgggagttgtgtgcaggtatgttatgaagcttaagcagctctacggtgatgcgagagagcttccttacccgctgctctacaacctgttctacctgctcctagagcccttatggtatgaggtgtgtagagcttgtataccgttggctgatactaggactcccacgcacacagtgttcgaccatgtctatgctaccgcggctatggtcaactggctctacccaggtggtggtaagcccggtggctttcttgtaaaggttgatgtggctggtattcagggcttcatatccgcctcgaggaagactcgcgacctctgggctggctcgtggcttgtatcggcgctcgcctggttcactgtttcggaggctgttatgcttctgggcggcgacatagtgttgtcgccctacaaccctgcgaaccccttcttcatggcaacggtgctcgaggaactcagactggcagggagcgagtacagcgggcttgtacggtttgtggaggataaagtggagagggcttacctctggaagggggctgccaaccagcccgtaatacctggcaccatcttcctagccctaccctgcatcgacgaggacgactacgagagactgcgcttggaggcagagaagctgaagaccgtcagcgatgacgtctttaagcttcttgaggcgctgaggagctgcgacggggaaaagctgcgcaaatacttcattgggaggttctgggaggggtggagaaaggtatggtgtgcagcgatagagtcggcaagggtggggagaggatgtaatattgagaagttcgccgagaccatagtcgatctaggagttacggatctgagcccggaggctgttagagagtacctggaggcttcgagaaataatcccccgatgcagctgcgtatagttgttatcaacatagaggatgaatatgataggctcctaggctggcttagagagaagaaagggaagcttagcagcctacgagtggaggaggctgcacagaagcttctcttcacatggctgttcacgagggccctaccggaggctgaggagcgggagtacgctaagagcgtgagcatagatgcgggattcgcgatagctgaaagcctggaggaggccacttctaagcctttgaagcctgagttccacgagtgtagcatgtgcggtaggctcccagccatagtacatctagcggatgcagcgaaggtcagagagttcgcggaaaggcttggggttcccgtggtattgttctctgagggtgagagtctctgcccctactgtctggtgaggaggctcgtctcgacaagtgatgccattaggaggattatgaacggacttaatctctactactcactgaacccccggcagctctacacgaggcccccgtcgacagatgagcttgctgctatggataagcttttagcgatagtcgacgctctaagcaaggatgagcagctggccgccgagcttcgaagcttcttctgcaaagacgataatggcagaaatgcctgtgagtataggggtaagtatgtgtctgagatcgtggagcgctacgcgtacacgaaggcaggccagaaggccaaggagatactagggctcctagaggctatctacgataagctcctgggcgagtttggtgaggagttcccacacatgctcatagcaggcatactggccagcgaacagcgctgcgcaagccatctcgctaagagtgtggcaaaaatccgggagaagagggaggaaagggttggcagtgaggtgcaggagaaggctagggaggtatgcagccttctagcgaagctctatagtagagctgatggtgttgcagggcgctactatgctattgtgaggggtgatggcgactactttggcagcaggattatcaagggcgtcttagactttaagagctccagagactatgttgaggagatgctgaaagccattagggatgaaggggcgcgaagccgcctggcccccgtatactctgagatcgccacattactcgtagacctcatggaggaaatgaagccggaaacccccagctcaggctgcaagaagggctgcaaggctctgccaaagcctgccacgctggttacaccaacatactatatggccctgtctagggggcagatgattaccgccctttacgacgccgagatagtggcaatgcttggcggcttcccagtgtatgctggcggcgacgatgtcgcggctctcgcgccgggctacataagcaaaggtagactagagaatctcataaagggctatgctaccagggccacgcatatcaaggacagtataagggcggacacgggctttgtgccagcactcatagcgctctacaccaggaagaactactggggactactgtgggctggcaggggcttccaccgcacacctataggggcagtgtaccccgccccggttgcctacggtaggagctatggcatctacattgtccactaccgcgacccattcatggcggcttggaggagcgctggcgaccttgaagagtacaaggatgtaattgccttcacaagtccacacggcaccacagtgtctaaggatgcaaccttcctagcctacgggagggtgtccagtatagctggcgtagagttgggtgctgtagcgctacccaacatgaagcctggcgcaggcaaggagaaggtaatcacttggggggctgcgggcaggaagcctgaggagccggagccggtggggtggacgctggctctcagcctcgatttagcttcgaaggtcgaagaagaggaccgcgttatctcaagaagtctctacagcgacttcgagagggagtgcccgctagccatgcgtatagcccggaaaatcgtactcaccggaagcaccgacctgcaaaggattgcggaatccctgctggaaatgattatcaggcggaacacgccggagagacataggaggaaaattgaatacataactaagcttctcaaggaggtcgctatggtggcgccggcgccagctaagcttctagaagctcttgaatgtggccagctaagagtcgaggaggccgagaagaggcttaacgggttcagcaagcttgcatgtcttgcacccctgccctggcagatagtccttgcagcctacacaatatcatctgggaggaggtga

SEQ ID NO: 659 - protein, 1203 aa, Hyperthermus butylicus
MSRLHMVKLAALLHDPAWKPWIVASAFPGKTGTVGRVLAKVAGKSAPAGELVKVEECEELMKKMKTYTIEADAHQLDAAAAAVAILDGLRDAPIIEKLILDEKGVVAEADKLAASLDRWVLTYKHREARDVKVDVGDVAYANPLDPRFKMPESMRSIDAGVVCRYVMKLKQLYGDARELPYPLLYNLFYLLLEPLWYEVCRACIPLADTRTPTHTVFDHVYATAAMVNWLYPGGGKPGGFLVKVDVAGIQGFISASRKTRDLWAGSWLVSALAWFTVSEAVMLLGGDIVLSPYNPANPFFMATVLEELRLAGSEYSGLVRFVEDKVERAYLWKGAANQPVIPGTIFLALPCIDEDDYERLRLEAEKLKTVSDDVFKLLEALRSCDGEKLRKYFIGRFWEGWRKVWCAAIESARVGRGCNIEKFAETIVDLGVTDLSPEAVREYLEASRNNPPMQLRIVVINIEDEYDRLLGWLREKKGKLSSLRVEEAAQKLLFTWLFTRALPEAEEREYAKSVSIDAGFAIAESLEEATSKPLKPEFHECSMCGRLPAIVHLADAAKVREFAERLGVPVVLFSEGESLCPYCLVRRLVSTSDAIRRIMNGLNLYYSLNPRQLYTRPPSTDELAAMDKLLAIVDALSKDEQLAAELRSFFCKDDNGRNACEYRGKYVSEIVERYAYTKAGQKAKEILGLLEAIYDKLLGEFGEEFPHMLIAGILASEQRCASHLAKSVAKIREKREERVGSEVQEKAREVCSLLAKLYSRADGVAGRYYAIVRGDGDYFGSRIIKGVLDFKSSRDYVEEMLKAIRDEGARSRLAPVYSEIATLLVDLMEEMKPETPSSGCKKGCKALPKPATLVTPTYYMALSRGQMITALYDAEIVAMLGGFPVYAGGDDVAALAPGYISKGRLENLIKGYATRATHIKDSIRADTGFVPALIALYTRKNYWGLLWAGRGFHRTPIGAVYPAPVAYGRSYGIYIVHYRDPFMAAWRSAGDLEEYKDVIAFTSPHGTTVSKDATFLAYGRVSSIAGVELGAVALPNMKPGAGKEKVITWGAAGRKPEEPEPVGWTLALSLDLASKVEEEDRVISRSLYSDFERECPLAMRIARKIVLTGSTDLQRIAESLLEMIIRRNTPERHRRKIEYITKLLKEVAMVAPAPAKLLEALECGQLRVEEAEKRLNGFSKLACLAPLPWQIVLAAYTISSGRR

SEQ ID NO: 660 - DNA, 23 bp, Ignicoccus hospitalis
gagtctcaaaagaggatagaaag

SEQ ID NO: 661 - DNA, 1572 bp, Ignicoccus hospitalis
ttgaaggcgctggtaatatctacgtggggcaactctagagcgtgggaaagggtcacctatcgcccggacgaccatttgaaggatgcccttgaggacgtcctggaacaagaagtcacctcatgtaatgtgctgaagctcttcaaaaaagagaatacgagaaaagtcgtgctcctaccgatatcccttctcgacgaaaaagcgaatgatctcaaagaggcagaggacaagataaaggaaactgtagttacatcgaacgagaacgacgactgcagaaaagatctaaaagaaatcttgaacagctccgaagtcaaaatcgttcttgggagtggaactttcctctcgaataaggtcataaaaaagtttgaggttccgttcaacaccgtgttaagcgacctatacttgaaactctacgagagcttgaaggaagagtacaagcgtgcggaggaagaactcgaggttattttagacataactcacggagttaactactaccccgtaagctccagagctatactcgagaagctcttagcagttatgagtcacagaggaaagagtaggctttacgtcgcttcgagcgaccccttcgtgcgcggccgagggggctctgtgaaagagaccatgaatctcgagtaccacttaatcgagaagaaggcgtttcccaaaaacgcgttcctaaccttggcaatagatatagagtttaaaaacgtggtaaagggaaaaagcgagataaatgacgagttggaagaattgaagaagatcaaaaaatacataggattgttaagcgtaccgagcctcctcgcgtggagctacctcaaatacgtactggagaacaacaacgccataaagaaagccgagaacttgttacttaggataagtaaagaacttgagaaattctccatcgaagacgacaagttcaaatttagtgtggaatttaatccaaaaagcgtgtttgacttaatagcgctgatcgaagtaggcgaagccctcaaggacttaaaaggggagaagaactgtgacttcttcgcggttgagttcgatgacttgaacgctagcaacaataaatataaggacctcatggaagatgtatccaagcgcttatgggagaaggagttcaatgacctaaaattgaccattagatcctatgagcgagtaaaagaagaggcgaggagcgcgctcgaagagttaaagaacatagacgacttgaggaacctcgccgtgtccgaggagaagctgagggaaaaggtagaaaaagaaagcacagaacgcctcaagtgcaaactggaggaacttcgaaaatacatcatggacgggtggctcccgtactcgttccttagggtgggcagcgaggtcagcggaggaggagagagcatacggaagaagctccaagaggaggccctgtggtgggccgtgtgggccctccgtgtcaatagggatgactgttcggctgacgaagccactgttagaaacttcgtagctcacgcgggcttggagatgaacgtaaccttcgtgaaaaatgacaaagtcgcgtactacctcccctcccttgagtgcataatagagaaattaacataa

SEQ ID NO: 662 - protein, 523 aa, Ignicoccus hospitalis
MKALVISTWGNSRAWERVTYRPDDHLKDALEDVLEQEVTSCNVLKLFKKENTRKVVLLPISLLDEKANDLKEAEDKIKETVVTSNENDDCRKDLKEILNSSEVKIVLGSGTFLSNKVIKKFEVPFNTVLSDLYLKLYESLKEEYKRAEEELEVILDITHGVNYYPVSSRAILEKLLAVMSHRGKSRLYVASSDPFVRGRGGSVKETMNLEYHLIEKKAFPKNAFLTLAIDIEFKNVVKGKSEINDELEELKKIKKYIGLLSVPSLLAWSYLKYVLENNNAIKKAENLLLRISKELEKFSIEDDKFKFSVEFNPKSVFDLIALIEVGEALKDLKGEKNCDFFAVEFDDLNASNNKYKDLMEDVSKRLWEKEFNDLKLTIRSYERVKEEARSALEELKNIDDLRNLAVSEEKLREKVEKESTERLKCKLEELRKYIMDGWLPYSFLRVGSEVSGGGESIRKKLQEEALWWAVWALRVNRDDCSADEATVRNFVAHAGLEMNVTFVKNDKVAYYLPSLECIIEKLT

SEQ ID NO: 663 - DNA, 837 bp, Ignicoccus hospitalis
ttgaaaaaggacgtcgtaccggcgttgatgagcgccgtcacgcacgtccacgtcggctgggggaggggacaagcggacgtggaccaaccaataattaaggaccctatgggaatacccttcatccccggctcctccgtcaagggcgcgcttaagacgaagttcttgatagagggcgggtgcacgtcgagttcgaacgggggagaggggtactgcgagaagtgcgcagaagtttgctgtctcttcggcggcgaaatgggaggagagggggcgtccagagtggtcgtagcggacttctacccgctcctcatcccagtgccctctttggactatgggtacgtctacgtaacttctgactcgctcttgcagtacgcagaatctttaggcattaaagtgattaagggagagggtgagggcgaggaaatattcgtgggaacgcagaaggtatctgttaacgcggttcacctcgatgaacgtgtggcgcggctccacccgttcttgaagcgtttcctcagaagcgacagtgataagtatgtaagggtatacaaagttgacgacgatcatctgtccagattggtggacgcggcgctggtacggttaactagggttaaagtggcgaggggcacgaagaccgttgaacgcggcaagctctggacggaagagtacctaccccacgggaccgtcctggcgggggcctttgtttacaggccttggaggaacgtctactgcgagaggtgtgagaggtgtgaggaaatatgggaaaggctgaaagacgttctgttgacgatcggaggcaaagagactatcggtaaaggcttggttaagatcacggctttctga

SEQ ID NO: 664 - protein, 278 aa, Ignicoccus hospitalis
MKKDVVPALMSAVTHVHVGWGRGQADVDQPIIKDPMGIPFIPGSSVKGALKTKFLIEGGCTSSSNGGEGYCEKCAEVCCLFGGEMGGEGASRVVVADFYPLLIPVPSLDYGYVYVTSDSLLQYAESLGIKVIKGEGEGEEIFVGTQKVSVNAVHLDERVARLHPFLKRFLRSDSDKYVRVYKVDDDHLSRLVDAALVRLTRVKVARGTKTVERGKLWTEEYLPHGTVLAGAFVYRPWRNVYCERCERCEEIWERLKDVLLTIGGKETIGKGLVKITAF

SEQ ID NO: 665 - DNA, 3078 bp, Ignicoccus hospitalis
atgacgtgtaataatttaataaagaaaaagatggttgcactgctccacgacacgccggaaaaggcgtggttaatgtacgtcaagaagaaacacgaagaatacgctaaggaaaggataggggacgtccttggagaggaatacttagactacttcaaagacgttaaagcgtacgacgtaatttcctctactatagataggtgggtcgtgccctcccggatgaacatcgatcgcgtgattaggctgatcaaccccttcgaccccaacttcttctatgagatcgacttggggcaaataagtaaggaaaagatagaggattactggaacaagttgaagacgtgtttgagcaaggtaagtggtgacagagagaggtaccacgcccagtacgtcctcatggagctgctgtggtacaagacagtaaaggtccccctccccgccgacaccaggtttcctacccacacagtcttcgaccacgtatacgctaccgcttccatgattaacatctataataacgatagcaagaagttctccggcttcatagtgggaatagacataccgggcattcagagcttcataagcgggggacggaggcccggggactggtggatcaggagctggttgatctccgcgaccgtgtggtacttaataaaagagctcgtctggaacctcgggccggacgtactgttaagccccagcgcgcgctacaaccccttctactacgcaacggtagcgcatagagtacaagcggtcagagagtgtttggacgagaacctcacctcgcccgaacagcccttgatgcccgccacagttaccttgctcctccccgcctgcagcatagagcttatgaggtctgaactggtcgagaagggctcgctgaaggaaggcgaaggagtttccgacccctccgtgattataagccggtatttcaaggagaggttgaaggaggcttggaagaacgtcattgaagatatacagacccggttgcggagcactgccgataatctaataaaaacgctcgaaaaggtcagggtatgtaccggcacgtgtaccgacgtagcgtctgccgacgatcttatagagagaatgatagaaataataaagcatgcggagagagctcccttcgacgttaaaactgtagttataaacctagaagaggcctttgaggaattcgtcaaagagttcagaaggatagaagggaaaatgagagctgaattggagcaacttataagctccgaaggcttagccgtaggaaaggacgtattcccctactccaaggaccttagcgacgtgatgagtgacttagagaagaagctgttcttccactggctagttaccaagaagtatcccgaagagttccgcaaagcgaaggccgtccgcttagacccgctgctcctggacggttggacgctagaggtcactaaagctaggtatgagagctgtaaggacaagtccgcgcccatgtgtacttgtggcaggcccgcggctgttcataacccgtctgaggcctcgagccccctacttaggtcgcacgaggccctctgtccttactgtttgatcttacggttgttacaatattacaccgatgcgttgacctccatagtggaagccgaccacgtcaaggctccaaaggtcgtaatgtccacgttggcagccttgccggagctggtcaagtggctttccgagtctggaggagcggttgagataatggatgaaaatggaaataatgtggggttgccgaaggaccagctcttagagagcttgacgaggagcctcaaggaatatagctctttcgacttctatcagaataagtattcccgttttagcttggaggaggtcttggaagagctgcagaaaaacgagacggtggagagactcataagggacgattctaagaacttgtacatacgagttcttgtacgtaaggacagagactcgagcaagttgctctctctgaacaagtacatagctatggtaaaagctgacgcggacaacatgggtaacctcaaagggggcaggctcggttacgatgccgaagcttactttgaaacgatatatagacaagccggacctcggcgaggggtcggtcaagaggagaagctgtataaacttgctggctcgttagtaaggagcgtaatagaaaggctacatgaaatatatccgaaagaggtctacggggagaacgactcgtccttgcccacagtcttggtcacgcccacatacttgttccaactctcttactccttaatgacggaagcgctagtagataaggagatagtagaaaagaattacggcctattagtgtttgccggaggggacgacctcctagccttggttccggcgagaagcgtctcgaggggttcgggacgcgcggaacccctcggaggtctagaggaattcctctctcgggagttgctagaaattgtgaaggagttctacttctcccccgcgctctgggtttggtggttgacccggctcaaccactggggactgctccgcagtcccgtcggcttccgatatacagacaacttcttcgccccggccttgttggcatacgggaggagctacggaatagcaataaggcactaccgcgacccgctggccaaggtctttgaggacgcgagcgaactggaagaaagcgcgaagaacgtatctaaaaagaaggacggtgtaggagtgagctacgggcgcttaggggcgaggggggtcgctctgtcgaactcgctgggcgtcgaagacaagggggacctaaaggaacccgcttcattgggtcccattatagccaaactctcatccttccatcgccgcgggctgagcaataatttctactatgatatcgtgagggagttgcagaagtactttggtcacgacgcgaaacacgagtgggctgcagcgaaagggctcaccacacccatcataatattgttgaaatatataattagtaggaacgtggcagacgaggagaagtattcgcaaaacctaaagaaggaggtcgaggaagtcttagagttcttgaagctcacaaatgagtatatttttgatgtgttggagttcggctttgcgtggcacaaggccgtgaggtga

SEQ ID NO: 666 - protein, 1025 aa, Ignicoccus hospitalis
MTCNNLIKKKMVALLHDTPEKAWLMYVKKKHEEYAKERIGDVLGEEYLDYFKDVKAYDVISSTIDRWVVPSRMNIDRVIRLINPFDPNFFYEIDLGQISKEKIEDYWNKLKTCLSKVSGDRERYHAQYVLMELLWYKTVKVPLPADTRFPTHTVFDHVYATASMINIYNNDSKKFSGFIVGIDIPGIQSFISGGRRPGDWWIRSWLISATVWYLIKELVWNLGPDVLLSPSARYNPFYYATVAHRVQAVRECLDENLTSPEQPLMPATVTLLLPACSIELMRSELVEKGSLKEGEGVSDPSVIISRYFKERLKEAWKNVIEDIQTRLRSTADNLIKTLEKVRVCTGTCTDVASADDLIERMIEIIKHAERAPFDVKTVVINLEEAFEEFVKEFRRIEGKMRAELEQLISSEGLAVGKDVFPYSKDLSDVMSDLEKKLFFHWLVTKKYPEEFRKAKAVRLDPLLLDGWTLEVTKARYESCKDKSAPMCTCGRPAAVHNPSEASSPLLRSHEALCPYCLILRLLQYYTDALTSIVEADHVKAPKVVMSTLAALPELVKWLSESGGAVEIMDENGNNVGLPKDQLLESLTRSLKEYSSFDFYQNKYSRFSLEEVLEELQKNETVERLIRDDSKNLYIRVLVRKDRDSSKLLSLNKYIAMVKADADNMGNLKGGRLGYDAEAYFETIYRQAGPRRGVGQEEKLYKLAGSLVRSVIERLHEIYPKEVYGENDSSLPTVLVTPTYLFQLSYSLMTEALVDKEIVEKNYGLLVFAGGDDLLALVPARSVSRGSGRAEPLGGLEEFLSRELLEIVKEFYFSPALWVWWLTRLNHWGLLRSPVGFRYTDNFFAPALLAYGRSYGIAIRHYRDPLAKVFEDASELEESAKNVSKKKDGVGVSYGRLGARGVALSNSLGVEDKGDLKEPASLGPIIAKLSSFHRRGLSNNFYYDIVRELQKYFGHDAKHEWAAAKGLTTPIIILLKYIISRNVADEEKYSQNLKKEVEEVLEFLKLTNEYIFDVLEFGFAWHKAVR

SEQ ID NO: 667 - DNA, 1065 bp, Ignicoccus hospitalis
gtgatagcgatagagcccctcagcttcgtgagcttcaggaagcccggccctttcggactgacccagcgaggccccctgtccacgagctctacgtacttcgcgaagaccaccgcgctggtggggttgttggcttacttggcctactccaaaggcttcgagtgtgaggctgaaggcctcttcgaggccactaagaagtgcgtagggcagtgcttcaagggaagcttgcgagggccttacgtcttgcaccgagactcctcttgtttatacttcggcgaggagaacttgttcaacctaacggttctcttcgaaaagtggaacgaaattaagacggcagtgaagaagtacttagagggggaagcggagttagggaggaagaaaaagggaataatcgattacttcacgaccccctcatacaatgaggcccttgcgggagggagtagcccacaaaagcgcggggtgggttggagagagctcatctcccaccagttctcaaacaagttgtcgaggtccaagaagatgagtgagttcgttttcgtaagggaaaggttctacgctaggaaagtggagatgttcttcgaagtcggcgaggttgagcctcgctgcctcgacgacgcgctattgcccctggggggcgatgggggattaacgagagttgaagccaaggacgtaaatcccgtagaagagaaattaaaggacttgtggggcgagtgctgggaaggttgcgagggggctcaatcggtagtagtggtaatatctcctctgataatgggttccgagggcgattatagcgactacagaaggcccttcaaagaggtcctcgacttcgaaggcgcgtctagagagttgttgcccctctacgatcgctacactatcaaggcgtatcccttaggctgggacttgatgagggattgtccgcggcccttcgtccccgcagttgcccccggatcggccgtcgtggggaagttgaagaaaccgccgaaggaaatctactggaaagggctaggcctctttagagacctcggtttcgggacggtgctccctctacccttagacccgaccacatga

SEQ ID NO: 668 - protein, 354 aa, Ignicoccus hospitalis
MIAIEPLSFVSFRKPGPFGLTQRGPLSTSSTYFAKTTALVGLLAYLAYSKGFECEAEGLFEATKKCVGQCFKGSLRGPYVLHRDSSCLYFGEENLFNLTVLFEKWNEIKTAVKKYLEGEAELGRKKKGIIDYFTTPSYNEALAGGSSPQKRGVGWRELISHQFSNKLSRSKKMSEFVFVRERFYARKVEMFFEVGEVEPRCLDDALLPLGGDGGLTRVEAKDVNPVEEKLKDLWGECWEGCEGAQSVVVVISPLIMGSEGDYSDYRRPFKEVLDFEGASRELLPLYDRYTIKAYPLGWDLMRDCPRPFVPAVAPGSAVVGKLKKPPKEIYWKGLGLFRDLGFGTVLPLPLDPTT

SEQ ID NO: 669 - DNA, 35 bp, Methanopyrus kandleri
ctcgcaattaacccgtaataatatgggtaatgaaa

SEQ ID NO: 670 - DNA, 1191 bp, Methanopyrus kandleri
gtgggcacctccacgctgaacaacctggcacgggcgctcgggaaaggtgacctagacgccgatttggacccgggagacgcctaccgcgccgcgaggaacccggaggcggttgaggagatcggcgaggaagttctcgaggaggctctcatggagctagtggaggcggatccgaagcgggcttccgccgagctgaacacgctcctgcgcatggcggagcgggccgagcgcgagggtctcgagatcgactcgatcgcgctgatcccgacgaagaccgccaactgccggttgtgcgcgagggtcgtggcggagtacctgcgggaggagggctacgcggtctgggagaccgaacccgtcagggcgggtgtggacccgggggagttctggtggggtctaagcgacctgctcgagcggctcgaggacgtcggcgtcacggacccctcgcggaacgtgtgggtggccgccacccccggcttcaagcccgaggccgccgtcctgacgctcgtcgcgtcgctgttcggcaagcccgtgttctacgtgcacgaggtcatgaacgagctcgtcgagatcccgcccgcgatgccggtcgtcaccgaccccgggttcgtgctcggactgatcgagctccggaggaggctcggtgacggcgcccccgaagaggtggcggaggaggtcctgaacgacctggcgcgggacgaggaggaaagggagcggtacaagctcttcctcgtggaggatccgcggagcaagaacatcggaccgtcgccgctggcccggctcgccgagtcgttcctggcgcttggcctgctcgcggcgaaagcgcggaactactccgttgagatccggaccaagggacacaccgtcccggtgagccggggaggcggtgtgaagaaggtcgaccgggcgaccctgagggagctcccgctggaggacgacaccctcgaggtcctggcgaccgtggccgcgctcgaaggcgtggatgacacctggttcgtggccggcgagtggacgaccgaggggacgcgtcggcacgcgaggaccgtggaggtactcgaaactcgggacgacgccgtggtcgtgtcggtcagggaccgacgggtgcacatctcgaggctcctgatcccgaccgaggatcccgagcgggtggcgcgggccctgaaacagctggtcggggcgctgtccgacgcccgctag

SEQ ID NO: 671 - protein, 396 aa, Methanopyrus kandleri
MGTSTLNNLARALGKGDLDADLDPGDAYRAARNPEAVEEIGEEVLEEALMELVEADPKRASAELNTLLRMAERAEREGLEIDSIALIPTKTANCRLCARVVAEYLREEGYAVWETEPVRAGVDPGEFWWGLSDLLERLEDVGVTDPSRNVWVAATPGFKPEAAVLTLVASLFGKPVFYVHEVMNELVEIPPAMPVVTDPGFVLGLIELRRRLGDGAPEEVAEEVLNDLARDEEERERYKLFLVEDPRSKNIGPSPLARLAESFLALGLLAAKARNYSVEIRTKGHTVPVSRGGGVKKVDRATLRELPLEDDTLEVLATVAALEGVDDTWFVAGEWTTEGTRRHARTVEVLETRDDAVVVSVRDRRVHISRLLIPTEDPERVARALKQLVGALSDAR

SEQ ID NO: 672 - DNA, 1290 bp, Methanopyrus kandleri
ttgcggaccctcccgatcgcgctgaccctgctgctcgtaccggcggccgcccacgcgctccagccggaggtcctgtggaagggagagttccccgactgtccggggagcggcttcgtacacctggtacccgtcgagaacgaggagaacacggcgctgctcgtcgtccgtaccttcgaacgctggtcgctgtacgaggtgaagggctccgaggtcacgcacctcggggacgtcgacctggccacgccgaggtccaccgaggtcacgggggccatgtactaccccgaccggaacgagctgctggtcacggccgtgatcgaggaggaaggggagggaccgggcggcggcgtcctagcgatcagggtcggacgcgacggggtcgacgcgcgtaagttcgacggcgcctacgtgcacgcgagaccgtgcccggacgggacgatcctggcgctgctccacgagggccacgagtacctggaggacgagggtgtccaccgtcacgacctcgccctgatacgcctgtaccccgacggtcgcgcggagcggttggtcacgttcgacgtcttctccacgctgccgcccagtgccctgctgatcccggggacgctccggatcgagccgttgggcgacgactacctgatcacgggctcggacctcgtgagcatggtcgagctcaggaggacggcttccggctgggatacgaggtactacggcccgatgaacctcggcgccaggataacctactacctcgaggagtcgacggtgttagacccccggaagcggctggtgctcgtccggcagtccaatctggacgagccgctcgagggttactgggcgatctgcgagctcgtcccggagtcgggactgggaggcccggtcctgaaggagctgcgccgggtcgacctcggaggcgatgacctgtacttcccgcagtcgggggtcaagctggaggtcggcgggtcgacgtactacgtggtaccggcggtgggcgcgtcgtcgacgaagctcctggtgctcggacccgacacggcccatgtatgggaggtacccgggttcagggagctggcggtgaccccgaggctctacggggcgagggtctcggagagggagacgggagggtgcacggtcgaggtctgcgcgttcaaaccctcgaggggcgaggagtggctgacgccgctcttcggcggcaccggggagggcgagaagaaggaggagcacaaggagaacgagggcggtaaggtcgcgatcgtcccggtcctaccggcgattccgttcagacgtcccggtagggcgtga

SEQ ID NO: 673 - protein, 429 aa, Methanopyrus kandleri
MRTLPIALTLLLVPAAAHALQPEVLWKGEFPDCPGSGFVHLVPVENEENTALLVVRTFERWSLYEVKGSEVTHLGDVDLATPRSTEVTGAMYYPDRNELLVTAVIEEEGEGPGGGVLAIRVGRDGVDARKFDGAYVHARPCPDGTILALLHEGHEYLEDEGVHRHDLALIRLYPDGRAERLVTFDVFSTLPPSALLIPGTLRIEPLGDDYLITGSDLVSMVELRRTASGWDTRYYGPMNLGARITYYLEESTVLDPRKRLVLVRQSNLDEPLEGYWAICELVPESGLGGPVLKELRRVDLGGDDLYFPQSGVKLEVGGSTYYVVPAVGASSTKLLVLGPDTAHVWEVPGFRELAVTPRLYGARVSERETGGCTVEVCAFKPSRGEEWLTPLFGGTGEGEKKEEHKENEGGKVAIVPVLPAIPFRRPGRA

SEQ ID NO: 674 - DNA, 1107 bp, Methanopyrus kandleri
gtgacggtcgtcccgctggttctggggctgatcctgaccgcgacaccgtcggcgggtgagcccctgatccggggtaaggcgagcgacgacatcgggtacctggcccggtacttcgagtccgtcgtggaacccaagtggaagagtgcggacgccaggatcgtcgtcgacgcgcgcgggttccggggacggaccgtggacgtcgtctacgtccccgggctggacgcgttcgtggttccggctgggggacgtccgaggggtagcgtgacgagcgtctcggacgtcctacccctgtcgtacgtcgagtgcgaacccgggaaggtccggatccgtttggaccgcgtgggccggaccgtagtggtggaagggccggccgtggtcgttcgggggctctacccgccgatccccctcgacgtgagcgctttggtagacggttaccggtgcacggtcgtcggcggtgttcagctcccgatcgacggtggttgtcccctcgctccccgcccctacgtgccaccggcggcggtactggagggcgggggatcgtcggaccgggtggtcctggccgatggaccgtggccgctgctggacgtcgagtacctcgtgggtggcgacgtcgtgaacatgcgggttcagctgctcgaagacccgcttacctccgcgttggagctggccatcgccacagtttcccaccggaaggcggacgtcgcccctctacagggggtcgaggtcacgttcgacctcggatccgggaagatacggacccgacacgtcgccgtcccgtggaggcctacgggggacacgtccgaggacggtgtcgggacgttgaagggcggggtcgtgatgcgcacggctgacggtctcgaaccgttgctcgtgtggttcgaggtggcgcgggacgacccgatgatggagttcatctcggacgtcgtggaggcgtaccgacggggcgatttcggggaggtcgggcggttgatgaaggctcatccgaacgtcgtgttcctgttccccgaggggagggaggggttctgggtgtacgccccacaggtggtgccgctacgtcgcgctcaccggaggcggatcgccgggacccgccggcggggttcaccgtga

SEQ ID NO: 675 - protein, 368 aa, Methanopyrus kandleri
MTVVPLVLGLILTATPSAGEPLIRGKASDDIGYLARYFESVVEPKWKSADARIVVDARGFRGRTVDVVYVPGLDAFVVPAGGRPRGSVTSVSDVLPLSYVECEPGKVRIRLDRVGRTVVVEGPAVVVRGLYPPIPLDVSALVDGYRCTVVGGVQLPIDGGCPLAPRPYVPPAAVLEGGGSSDRVVLADGPWPLLDVEYLVGGDVVNMRVQLLEDPLTSALELAIATVSHRKADVAPLQGVEVTFDLGSGKIRTRHVAVPWRPTGDTSEDGVGTLKGGVVMRTADGLEPLLVWFEVARDDPMMEFISDVVEAYRRGDFGEVGRLMKAHPNVVFLFPEGREGFWVYAPQVVPLRRAHRRRIAGTRRRGSP

SEQ ID NO: 676 - DNA, 2085 bp, Methanopyrus kandleri
ttggagaaccggctctgggccctcacggtgacccccacccgagtgggcactggtgggcgacccggcgcgatcgacctcccgctgatccggcgcaggcacacccgcgtaccttacgtcccggggagctccgtgaagggagcgctgaggacccacgtcgaggccgagctggagaagccggacgacctggtcgatgagatcctgcgcgatctgggtgaggacaccgaggagcggcgggagcgcgccctgcgggtgctcttcggcgaccgagacaccaagggcgcggtgacgttcggggacctcctgcccgtggccgtccccgcgcccgtcgcgctggagggtggtaaaacgacgcccctcgtctggctcacctgtccctacgtcctggattggatcggcgtcgaggcgcccgagcccgacggggaggcgctcgcgccctcgggcttccccgcggagcgcgtggtgctggagcaccgcgagctcgtggtccgcaggaacgggaaagtcgacggcgtcgcggacgagctggtcgtcccgggaccgtggaagctaccgctgcactcccgcctcctaatcctcgacgacgctaccttcgccgggctcctcgacccggaccggcccgtcgtcaccgagctccgcacccgcgtccggctgggtggcccgtgggacaagaccgtggaggagggcgccctctggaccgaggagttcctgccccaggctcaccctcctcgcgggaccgtacgaggtcgacgcgtccacgctgggtccgaccgaggagcgcgcgctcgaggtcctccggagggtgacctcggtacagctcggcgcgggcggttccgtcggcttcggcgtcctacggttgaacttcgagggggagctgggatgagcgagcgttccccggagaacgtcctgctgtcgcggctccgggaggacgtcgacgaggagctcaagggtgacctctcgaccctgtgctcggtcctcctgtactacggtctgccgggcgccctggtgctcgcggaacgggaggacgtgagggaggcgctctcgaggctgccgctcgaccggatcgaacgcgagctggagagagaaggtctaccccgggccgacagactggccacgcggctcgccgacctggcccggaacgcggccgccgtcggcgagttgcccgaggatgaggggcgcgaccgcgtggaaagactgcgccggagggtcgcggaggcggcggaggagtccctagtccccgaggagggcgtccggacgcacccgtaccacgagaaacggacgctggccctccgggcgctgagtgacggggaggagaacctcagacgggaggtccgaaggctcctgagacgggtcgtggacgccgcggagaaagcggcccgctccgacgagatccgcgggtacgtcgggtcttacctgaagacgctgagggagctgggccggagcccgcacctcagggtccgcgaggtcgagctccggttcccgcactccaggctggtcgtggggatgggcggcccgcacccggccgagaacgacctcaccctggacccggtgaccggcctgcccgtgatcccggggacgaccctcaagggcgtggcccgcgcggccggcgagctgatcctcgaacgcggagaccccgacgagctgaggaagtacttcggggccgacgacacccgacaggcccggaagcgcttccgtgaggtgttcggatcgaagccaagggagtcggaacccaaagagtccgacgacgggaacgcatcggagtccaagcgcgccggcgaggtgaccttccacgacgcgctcccggatccggactggttgagggacgtcgactcgccgctcgaggtcgacgtcctgaacccgcactacggcgagtactacgagggagaggggcctccccacgagtcgatgcgacccaagcccgtcgagttcctgacagtccggcggggttccaggtggcgcacggtcctggtctcggagcggagggggtcgctggacgtcgccctgaggctcctgaagtacggcgtggagcgcctgggtatcggcgccaggacgtgcgccggctacgggtacggcgaggttcggtactga

SEQ ID NO: 677 - protein, 694 aa, Methanopyrus kandleri
MENRLWALTVTPTRVGTGGRPGAIDLPLIRRRHTRVPYVPGSSVKGALRTHVEAELEKPDDLVDEILRDLGEDTEERRERALRVLFGDRDTKGAVTFGDLLPVAVPAPVALEGGKTTPLVWLTCPYVLDWIGVEAPEPDGEALAPSGFPAERVVLEHRELVVRRNGKVDGVADELVVPGPWKLPLHSRLLILDDATFAGLLDPDRPVVTELRTRVRLGGPWDKTVEEGALWTEEFLPQAHPPRGTVRGRRVHAGSDRGARARGPPEGDLGTARRGRFRRLRRPTVELRGGAGMSERSPENVLLSRLREDVDEELKGDLSTLCSVLLYYGLPGALVLAEREDVREALSRLPLDRIERELEREGLPRADRLATRLADLARNAAAVGELPEDEGRDRVERLRRRVAEAAEESLVPEEGVRTHPYHEKRTLALRALSDGEENLRREVRRLLRRVVDAAEKAARSDEIRGYVGSYLKTLRELGRSPHLRVREVELRFPHSRLVVGMGGPHPAENDLTLDPVTGLPVIPGTTLKGVARAAGELILERGDPDELRKYFGADDTRQARKRFREVFGSKPRESEPKESDDGNASESKRAGEVTFHDALPDPDWLRDVDSPLEVDVLNPHYGEYYEGEGPPHESMRPKPVEFLTVRRGSRWRTVLVSERRGSLDVALRLLKYGVERLGIGARTCAGYGYGEVRY

SEQ ID NO: 678 - DNA, 1332 bp, Methanopyrus kandleri
ttgaggaccctgaccgtcgggtgcaccttcgccacgcccgcgatcacctcgcaggtgaggtacgaccgggacggaccgctcccccgacccccggagctcaggggacagttcaggtgggcgttccgggccgtcgcggcctccttcctggacggggacgggctccgccgcgtcgaggccgagttctggggcggcagaccgtcggaggggaaggacctccgaccctccccggtctcggtgcggctgaggaggggcgtgggtgaggacgacgtcgaggagggtggccggtgtgcgaggcgtcgaaggcgataccgcatcacgatcgacgaagacggtcgacttcgggtcgacaaccggtgctatctatgcccgcccatctacctgcgcggtcgacgtgaagagcaacctctcgtgatccgggccggagcgaccttcgagctcgagctgaccggcctccgagaagacgcactcgaggttgcgaagctctccctggagctgctgtccctgatcggtgggtacggccggcggttcaggcgcgccttcgggtgcttcgaggtccgggccgacgacctgtccacccgcgtggagggtaccgacgacttcgtcgataggctccgcgggtgcctggacgatctcagggaactgatcgcggaacgctccgacggtacctcggggcccgtggaatccttcccgagcttccgtcgcgccaccctctggacgttcgagtggaggaagcagcgcgtcgataaactcctggaccgtctggggggcacgctcagggaggcccgtcggaggctccggaacgagaggttcgagaactcgaacgaggagctccggtggctgctaggttcgagcgacgccgggggtcccctggctgctgcgatccccgctcctcctctccgtgacgccggtcgagctcgacggcgtgaaccgcggtcgctacgtggtctccgtcctgctgctgtggttagggaagctgcaccccgggaacgggaccgtcgtggtcgaggagggggatcggaagagggtcgagaacgctctcgagaggacgctacgccggtcgttccgcggcgtcgagcgccacgggatcgaagtaaccgagagccgcgtgagggtgtcgaaatcggcggggtgaacacccttggagaaccggctctgggccctcacggtgacccccacccgagtgggcactggtgggcgacccggcgcgatcgacctcccgctgatccggcgcaggcacacccgcgtaccttacgtcccggggagctccgtgaagggagcgctgaggacccacgtcgaggccgagctggagaagccggacgacctggtcgatga

SEQ ID NO: 679 - protein, 443 aa, Methanopyrus kandleri
MRTLTVGCTFATPAITSQVRYDRDGPLPRPPELRGQFRWAFRAVAASFLDGDGLRRVEAEFWGGRPSEGKDLRPSPVSVRLRRGVGEDDVEEGGRCARRRRRYRITIDEDGRLRVDNRCYLCPPIYLRGRREEQPLVIRAGATFELELTGLREDALEVAKLSLELLSLIGGYGRRFRRAFGCFEVRADDLSTRVEGTDDFVDRLRGCLDDLRELIAERSDGTSGPVESFPSFRRATLWTFEWRKQRVDKLLDRLGGTLREARRRLRNERFENSNEELRWLLGSSDAGGPLAAAIPAPPLRDAGRARRREPRSLRGLRPAAVVREAAPRERDRRGRGGGSEEGRERSREDATPVVPRRRAPRDRSNREPREGVEIGGVNTLGEPALGPHGDPHPSGHWWATRRDRPPADPAQAHPRTLRPGELREGSAEDPRRGRAGEAGRPGR

SEQ ID NO: 680 - DNA, 2382 bp, Methanopyrus kandleri
atgcggtatcgccttcgacgcctcgcacaccggccaccctcctcgacgtcgtcctcacccacgcccctcctcagccgcaccgagaccggggagggtcggaggtccttcccctccgacggtctgccgccccagaactcggcctcgacgcggcggagcccgtccccgtccaggaaggaggccgcgacggcccggaacgcccacctgaactgtcccctgagctccgggggtcgggggagcggtccgtcccggtcgtacctcacctgcgaggtgatcgcgggcgtggcgaaggtgcacccgacggtcagggtcctcaaccgcggccccggtccgccgccggggatagctttgataaagttaattcagggagagtggcgaggcgccggggtgagccgggtgccgaagctggtcaccgtgcgcctacggccgtccggcggcatcaagacctggctccggggtcgtaaactggcggactccctcgcggcgagttggttgctaggctacctggtttaccgcgtgtacgagcggctgtgccgtaggctggacgtcgagagggtcctccgacccgtcctaccggggaatcaccccttcgagaagaagccggataacctggagccgtgggagacgcgcgggtgcgtgatgccggacgccgtcgagctggtcgtggacggcgacgtgagcgcggaggaggtcgcccgcatcgcccgggagaccgtggaggacgtgctggaggacgtcttgaagcgcggccgcgagaccccctggaggtgtcataacgtcagcctgtacgagccgctcgaggactggtgggagcgcacgtccgggaggtccgcggcgagggtcgagctcccgcccggcctgatccaggtctccgcggccgtcgtggacctggaggagccagacgacgaagaagcgtaccgggaggccgtccgccgcgtcgcgagcctcgtcgggacgcgggccgaggtgatggacgcgaggggatccgggggtcagccctgcagcgtctgcggtacgtacccgaccgtgggagatcgtgagttctgggaggagctctcggagcggctccctccccagctcctgaagcggtgggagggcggcttcgagcgcctctgcgccgcgtgcctgctcaagcgctacttcgggacgcacgtgatacgctcctggtacctggagaagatctcctggatcccgtccacggccgaggtcgcgatcaccccggtcaaggtcgggatactgaacaggtgggaggagctcaaggacgacgggggcttccgagaggctgccctcgggtttctgagggaagtgctaccggagcagctgcggcagatcgcccactacctcaggtgcgtcaaggaggtggatcgggcgggggagctcgaggaggccgccaaggacctgaagagggaccgcctggagcccgaagggctaccggaggacgtgaggaaggaactccaccggctgacccccaaggcgcccagactggacgaggagctgggggacgtcgaggattccctgatcgaggtcctcctctgcgtcgagggcaggttctggtacgatcccgaggccccggggggactgagggagctgctcgaggccggcgacctggagaacctctacaccccgtactacgccctcctgaagctggacggcgaccgcatgggcgagctcttctcgcgggacccggagacgacccgcggggcctcccgggccacgatcgagttcggcctgaaggcgatgagaatcgtgcacgggcactacggggtcctcctgtactgcgggggcgacgacgtcttcgcggcgctccccctgcacacggccctcgactgcgcgttcgagctcgaggaaaccttccgggagagcctgaagaagtggaaggggacctgcagcgccgggctggccgtcgtccaccacctccacccgctccgggacgcgatcgacctggcgtaccggctcgagaagagggctaaggaggccggcaggaaccggctcgcggtaggactgtaccggaggaacgccccggagcgggtcgcggtcctgaagtgggaggccgacgggaaacgcccctgggggctactgttcgagctcgcggacctcgtctccaggagggccgcgtaccacctgccgcgggactggtgggagggctggtgggaggagctcgacgagccgaagaacctgctccgctcgctgctcgggtacgtggcgctgaggcaccgaggtgagggcgccgacgagggtgagatcgtcgggctcgtggagaggatcgccgaggtcgtcgggaaggccggacccgaggacggcgacccgggcgcggaggtgggtcgcgcgctggagatcgccctcgagctccgctcggagtgcccggccgggggtaacgggggttga

SEQ ID NO: 681 - protein, 793 aa, Methanopyrus kandleri
MRYRLRRLAHRPPSSTSSSPTPLLSRTETGEGRRSFPSDGLPPQNSASTRRSPSPSRKEAATARNAHLNCPLSSGGRGSGPSRSYLTCEVIAGVAKVHPTVRVLNRGPGPPPGIALIKLIQGEWRGAGVSRVPKLVTVRLRPSGGIKTWLRGRKLADSLAASWLLGYLVYRVYERLCRRLDVERVLRPVLPGNHPFEKKPDNLEPWETRGCVMPDAVELVVDGDVSAEEVARIARETVEDVLEDVLKRGRETPWRCHNVSLYEPLEDWWERTSGRSAARVELPPGLIQVSAAVVDLEEPDDEEAYREAVRRVASLVGTRAEVMDARGSGGQPCSVCGTYPTVGDREFWEELSERLPPQLLKRWEGGFERLCAACLLKRYFGTHVIRSWYLEKISWIPSTAEVAITPVKVGILNRWEELKDDGGFREAALGFLREVLPEQLRQIAHYLRCVKEVDRAGELEEAAKDLKRDRLEPEGLPEDVRKELHRLTPKAPRLDEELGDVEDSLIEVLLCVEGRFWYDPEAPGGLRELLEAGDLENLYTPYYALLKLDGDRMGELFSRDPETTRGASRATIEFGLKAMRIVHGHYGVLLYCGGDDVFAALPLHTALDCAFELEETFRESLKKWKGTCSAGLAVVHHLHPLRDAIDLAYRLEKRAKEAGRNRLAVGLYRRNAPERVAVLKWEADGKRPWGLLFELADLVSRRAAYHLPRDWWEGWWEELDEPKNLLRSLLGYVALRHRGEGADEGEIVGLVERIAEVVGKAGPEDGDPGAEVGRALEIALELRSECPAGGNGG

SEQ ID NO: 682 - DNA, 1335 bp, Methanopyrus kandleri
ttgaccgcgcgccacgtggcggtcgggttcctggtcctgcctcaggaccgcgcgttcttccgcaggcccgagccattcagggccgcggccgagtcggtggcggagtcggagggtcccaagccctggaccgtggccggctgcgtccgcaacgcgctcctggaggtcaccgacggggacctcggggaggtcctggagtacccgcggaagctcgtcaggtcggccccgcccgggtcgatcggggaggccctgggggagacggccctcttcctcgggacctgggtcgtcgaggtgcggcccggggcgcccgaccggctcgagcgcgtctggtggccgtgccccgcccacctggcgaggtacgagcccgaaagtgggggcgaggccgtcgacctgctgagggtcgaggaggtcggggacgcggcgatcgcgttctcgggtcacgacgaagcactccgccgccggtacgggttcatgacgccgaaacccccgaggcccggctcggacgtcgagacccccgggcgctacgtcgacacgggaacgatctcgaagatcctcgcgggaaggacgcccgcgagaaggacgccggacctcgaggacaacgtcgcgggacccggggaactcctgcgtcccgagctccacgtcggcgtcaagctggtcgggctcaagaccgcggacgagggctacctgtacgccgcgaggttcctcagaccgggcaggtccccggtggacgggggtagtctcgtcgggttcctcacggtcctggcggtgcccgaggacgcgtgggacgacggggtactggaggacctcccctccccgggcggccgactcggccggggacggcacgcgtgggtgatcccgctccgcgcgggggactggtcggacgacgtcttccccgaggtggaggaaccggagggggacctcccgggcctgtacctcgagaccccgaccccgttcccggagggtgacgtccggtcctcctccccgggcgaccgcctgaaggcagaggccgtcctcgtgagacccgggagcccaagagatcgcgtcctccaggtcgagctcgaggtctcggaggtggagtccgaggtactggccgaccgggtgatcgagacccgccgcgtctcgacgtggtccggtaagcgcgcctcccctgaccacctggccgccgccgagggaaccgtgctcgcgctcgggaagctcgacgtcgaccccggcacgcccctgctcctcttccccaggatgggggatgaagacagagagctgctcgcctccaggctcgcgttccacctctccggcgtgggtacggcctacgccctgagcctaccgggggtgagcccgtga

SEQ ID NO: 683 - protein, 444 aa, Methanopyrus kandleri
MTARHVAVGFLVLPQDRAFFRRPEPFRAAAESVAESEGPKPWTVAGCVRNALLEVTDGDLGEVLEYPRKLVRSAPPGSIGEALGETALFLGTWVVEVRPGAPDRLERVWWPCPAHLARYEPESGGEAVDLLRVEEVGDAAIAFSGHDEALRRRYGFMTPKPPRPGSDVETPGRYVDTGTISKILAGRTPARRTPDLEDNVAGPGELLRPELHVGVKLVGLKTADEGYLYAARFLRPGRSPVDGGSLVGFLTVLAVPEDAWDDGVLEDLPSPGGRLGRGRHAWVIPLRAGDWSDDVFPEVEEPEGDLPGLYLETPTPFPEGDVRSSSPGDRLKAEAVLVRPGSPRDRVLQVELEVSEVESEVLADRVIETRRVSTWSGKRASPDHLAAAEGTVLALGKLDVDPGTPLLLFPRMGDEDRELLASRLAFHLSGVGTAYALSLPGVSP

SEQ ID NO: 684 - DNA, 1029 bp, Methanopyrus kandleri
gtgacggacgccctcccgtacttcctcgtgtgccggacgccgacgagggcgggtgcgggtcagcgggcgacggacgtgatcgacctacccctccagcgcgaggcgcacacgaagctccccgtgatctacggctccacgctgaagggcgccctccgccacgcgacgctccggaaactctccgaggagctcgacggggagacctccgaggggctcgtcgacgcggtcttcggggacagacccggcgagggtagcccgtcaccgggcgtcgtcgccttcagcgacgccgtcctcctggccatgcccgtgaggtgcgagcccggcttcctggcctgggtgacctcaccgtaccagctcggtaggctgtacgaggtcctggagctgaccggggagctggaggacctccgggaggccgtcgaggaggtcctgaacgactgtaaggacccgcgggggaacggtgccctcgcgcccgaggagggcactctcctactcgacaggatcagggtgagggcggaggccagcgacgccgtcggggatctcgccggggtgctctcggagacggtgttcgagggcgcgcccgagccccacttccggcgctacgtggaggaacggctcgtggtcctgggcgacggcgcgttcgcggacctcgtcaactcgtgcacggagcgcgtcgtccgcgtccggctcaacgaggagaagaccgtggaacagggcccctggtacgaggaacgcgtgcccgaggggaccgtcttcttcggcacgctgaacgtgcggcacgacaccgtaccgcccaaaaacggcgtcgacgcccggaaggtgctgttcgggaggtgggaaccggacggcgtgcccgacggggacgacaggaagttggaggccctcaaggaggccgccggggagctggaggcgggcgtgctcggggcggtcgccgacgggagcggggacggctacctggacctccggttccaggtcgggggcagcgagacggtgggcttcggtctcgtacgtctcaggcagttcgtgggggagtga

SEQ ID NO: 685 - protein, 342 aa, Methanopyrus kandleri
MTDALPYFLVCRTPTRAGAGQRATDVIDLPLQREAHTKLPVIYGSTLKGALRHATLRKLSEELDGETSEGLVDAVFGDRPGEGSPSPGVVAFSDAVLLAMPVRCEPGFLAWVTSPYQLGRLYEVLELTGELEDLREAVEEVLNDCKDPRGNGALAPEEGTLLLDRIRVRAEASDAVGDLAGVLSETVFEGAPEPHFRRYVEERLVVLGDGAFADLVNSCTERVVRVRLNEEKTVEQGPWYEERVPEGTVFFGTLNVRHDTVPPKNGVDARKVLFGRWEPDGVPDGDDRKLEALKEAAGELEAGVLGAVADGSGDGYLDLRFQVGGSETVGFGLVRLRQFVGE

SEQ ID NO: 686 - DNA, 501 bp, Methanopyrus kandleri
gtgaccgtgaccccgttccggtgggccgtcgagtgcgtgagggatgtggagcggctgacgggcacggtctggaaggactccgacgacccgttggagacgtactacaagcgcgccacgagggccgccgtgatggtgctcgaggagggcctccccctgaccctcgcgttcatggcctcccggggatcgaaggaccccggcaccctgctggcctaccacctcgccatgtacctcaaccacgtcgtgttcgccgacgagcccgagtggtcggagctcagggaggagtgcttcggccggttcgacgacgtcgacgaggacgagatcgcggagaaggtcggagagtacgtccgggacgaggtcagggaggccctggtggagctggccgggaaggagggcaccctcgagatgcgctacgccgagtcacgggcgctcgaactgctcaacgtgatcaagcgcgtggccgagggttggcacaaggtgtcgaggttcgggggcggggattga

SEQ ID NO: 687 - protein, 166 aa, Methanopyrus kandleri
MTVTPFRWAVECVRDVERLTGTVWKDSDDPLETYYKRATRAAVMVLEEGLPLTLAFMASRGSKDPGTLLAYHLAMYLNHVVFADEPEWSELREECFGRFDDVDEDEIAEKVGEYVRDEVREALVELAGKEGTLEMRYAESRALELLNVIKRVAEGWHKVSRFGGGD

SEQ ID NO: 688 - DNA, 37 bp, Methanosaeta thermophila
gtcgaagagcgagttccaggaaaacaaggattgaaac

SEQ ID NO: 689 - DNA, 288 bp, Methanosaeta thermophila
atgcttgtctgggtgatatacgatatatcggatgacaggacgagaagcagggtcgctaagatatgcaagaactacggtttgtaccgcgttcaaaagagcgcatttctcggagatctgaaccggaacgagtcagattctctggccctcgagtgcgagtctgtcatagaggacaccgactcggtttatgtgtttccgatgtgcgaggactgcttcgataagataaagctgatcgggaccgggtttgatagagagctggtaagcggaatgactgtgaccaagttcttctag

SEQ ID NO: 690 - protein, 95 aa, Methanosaeta thermophila
MLVWVIYDISDDRTRSRVAKICKNYGLYRVQKSAFLGDLNRNESDSLALECESVIEDTDSVYVFPMCEDCFDKIKLIGTGFDRELVSGMTVTKFF

SEQ ID NO: 691 - DNA, 576 bp, Methanosaeta thermophila
gtgctcataacagtctcagatgtgatcgaatacctcttctgccccaggttcatattcttcatgcactgtctcaacatcccacagagggaggagaggtactacaaggttctgaggggcagggaacttcacgagagccgggagaaggtcaacaccagctacgtgagaaagaggctcaggtgcgtgagaaaggaggtcgctgtttatatgacatcccgcaggtaccggataaagggggaggtggatgaggttctctttctggatgacgggacagctgccccgatggattacaagtatgcggagtacaacgatgtggttcacagaacacacaaataccagctcgctctttacgggctgctaataatggaacattttggagcccctgtgaatcggggattcatatgctatactcgcagcgaccaccatgtggaggaggtgattttccggcgaaaggattatcatgctgctcttgagatagtaaatgagatacttagaacagttcagtacggttactatccggaagggacgaaacagaaggccaggtgcgtggactgcacgtacagaaacatatgtgattga

SEQ ID NO: 692 - protein, 191 aa, Methanosaeta thermophila
MLITVSDVIEYLFCPRFIFFMHCLNIPQREERYYKVLRGRELHESREKVNTSYVRKRLRCVRKEVAVYMTSRRYRIKGEVDEVLFLDDGTAAPMDYKYAEYNDVVHRTHKYQLALYGLLIMEHFGAPVNRGFICYTRSDHHVEEVIFRRKDYHAALEIVNEILRTVQYGYYPEGTKQKARCVDCTYRNICD

SEQ ID NO: 693 - DNA, 1857 bp, Methanosaeta thermophila
atggtgatccgtgtgatcgaggcagtagcaagaattggtaagcaaagaattggtgagcatgctcagagcggttgtgaggatatcctgtattacattgtggagaatccaaatctcaatggcggttacaaccatgctcttgttgtcacactcgaggagaaggacggagatttctcctacagaggggtggagctggaggagctcaaggattacagaagatacctgtacaaggggaagaaggggaatgccaccgatgccaccccgacatgcaagatcgcaaaggatatcgagaaaacattcgagaaaaaatttctgagatggtttgatggcattgattcttcagatctaagcggggaagaaagagccacgctgaaaaatataaagaatgtgttattctcaaacaaagataaaatctttaaggagctacaggagaagcgatctcatctcaaacagagagagaactgcataataacccttggatttgtgaaggatggtgatcttaaatacctggcggattatccggcgttcagaaacgttctcctcaaaaatagctgcgatcggttcttccgtaaatacggcggcgagtccagaggaacggatgcgctctgctctgtctgcaaggagcaaaaggatgaggtttacgcatacgccatcccctggccgttccacacattcgacaagcccggattcatagcaggcgggttcaggcagtctgatgcatggaagaacacgcccgtctgcttaaactgtgcgataaatctcgatgcgggaaagaagtacattgaggagagccttgacttcagcttctacggcttcaggtaccttctcatacccaagctcataatcggcgatgactaccaggagatcctggatattctgagtggtatgaagaaagaactgaagatgagccggaagaccaggaaccgcataaccgacgacgaggatgagatcctggatatggtgaaggatcagaaggacttcttcagcaacagcctgatgttttataaaaaggataactccgcttacaggatactccttcacatcgatggcattctcccatccaggttgagaaggctgttcgaggccaaggagagggttgaaggtgccttcgggatatacaatgagatggtgctatccgaagacaaaggcaggcttatatttgattttggcgttctgaggcggttcttccccagggagtcaggaaacgttacacacgacaagatgtttctggaaattgtcaacaggatattcgtggggaggtatgtggatcgccatcttctgatctcattcatgatgaagagaatcagagatgatttcgtgcatgggcgatccacgctgatgaacacgctcaacggattcatgcttcttcattatctgaaggagctgaatcttctgaaggatcttgaggtagacagaatgtcaggaattgttctcaaaagagaggagctcgaggcacttcctctggataagagggttgagaggttcttcgaggcgaacagggagttctttgacagcgatgcgaagaaggcaacgtttctggaaggcgtgcttgtgcagaagctgctgaacatccagtggatggagaagaatgcaaagccgttctacacaaagctgcatgggctcaagatgaacgaggccctgatcaagaggcttcttccggagatacagaacaagcttgaggagtatgagaagaactactacagggagctcgaggcgatcatagcggagcatttcgttctttcgggccgcgggtggaaggagacagatgatgagctgagcttctacttcgtgctcggtatgaacctgcacgagctcttcagggtggataaagagaaggaaaagacggaggaaacagcatga

SEQ ID NO: 694 - protein, 618 aa, Methanosaeta thermophila
MVIRVIEAVARIGKQRIGEHAQSGCEDILYYIVENPNLNGGYNHALVVTLEEKDGDFSYRGVELEELKDYRRYLYKGKKGNATDATPTCKIAKDIEKTFEKKFLRWFDGIDSSDLSGEERATLKNIKNVLFSNKDKIFKELQEKRSHLKQRENCIITLGFVKDGDLKYLADYPAFRNVLLKNSCDRFFRKYGGESRGTDALCSVCKEQKDEVYAYAIPWPFHTFDKPGFIAGGFRQSDAWKNTPVCLNCAINLDAGKKYIEESLDFSFYGFRYLLIPKLIIGDDYQEILDILSGMKKELKMSRKTRNRITDDEDEILDMVKDQKDFFSNSLMFYKKDNSAYRILLHIDGILPSRLRRLFEAKERVEGAFGIYNEMVLSEDKGRLIFDFGVLRRFFPRESGNVTHDKMFLEIVNRIFVGRYVDRHLLISFMMKRIRDDFVHGRSTLMNTLNGFMLLHYLKELNLLKDLEVDRMSGIVLKREELEALPLDKRVERFFEANREFFDSDAKKATFLEGVLVQKLLNIQWMEKNAKPFYTKLHGLKMNEALIKRLLPEIQNKLEEYEKNYYRELEAIIAEHFVLSGRGWKETDDELSFYFVLGMNLHELFRVDKEKEKTEETA

SEQ ID NO: 695 - DNA, 966 bp, Methanosaeta thermophila
atgagcacagtctcgaacagatctgagctgctgttcatctacgatataagagatgggaatccgaatggagatccgatggacgagaacaaaccgcgcatggatgaggagacaggggtgaacctggtaaccgatgtgcgtctcaagaggacgataagagattacctccacaatttcaaagggctcgagatattcgtgagggagataatctatgatgaggagaacgggtacatccaggacgccaagaggagggccaaggatttcggggaagatcaggagaggattctgagtgagtgcatcgacgtgaggctgttcggcggtgtgattccgctagagaaacggagacagaacaagcaaaaagatgagggtgagggatcatccaaaggggattcgattacctatacaggacctgttcagttcaagatggggcgctcgctccacagggtggccctgaagcacataaagggcacaggagcattcgcctcgaaggagggcatgacgcaggcgacgttccgcgaggagtatgttctcccctactcactgatactcttctacggcataataaacgagaatgctgcgaagcacactgctctcacagaggaggatgtgaggctgctcctcgagggcatgtggaacgggacgaagagcttgatatcgagaacgaaggcaggacaggtgcccaggctgctgctcaaggtcaactacagcaaggcgaactaccacatcggggatctggacaggatgataaagctggtatcggatgtgcagcacgaggcgatcagagggcccgaggatttctgtctcgatgtctcagcgcttgtgagcaggctcaaagctgagaaggactcgatcagggatcttgagctctgcttcgacaggcagctcaggttcgtcagggacggcgccgagttctccatggagaagctgaacgaagcaactggcatagcggtaaatccgattgcgttctag

SEQ ID NO: 696 - protein, 321 aa, Methanosaeta thermophila
MSTVSNRSELLFIYDIRDGNPNGDPMDENKPRMDEETGVNLVTDVRLKRTIRDYLHNFKGLEIFVREIIYDEENGYIQDAKRRAKDFGEDQERILSECIDVRLFGGVIPLEKRRQNKQKDEGEGSSKGDSITYTGPVQFKMGRSLHRVALKHIKGTGAFASKEGMTQATFREEYVLPYSLILFYGIINENAAKHTALTEEDVRLLLEGMWNGTKSLISRTKAGQVPRLLLKVNYSKANYHIGDLDRMIKLVSDVQHEAIRGPEDFCLDVSALVSRLKAEKDSIRDLELCFDRQLRFVRDGAEFSMEKLNEATGIAVNPIAF

SEQ ID NO: 697 - DNA, 702 bp, Methanosaeta thermophila
atgcgggatagcgtactggtcttcgatgtgtggggggattacgcgcacttcaggaagatctacacaaccagctctcccctcacgtactcttttcctccaaggacagcgatatcgggaatcatcggggccatagcagggctcagcaaggagagttacttcaggtacttttccagggataaagcaagcatcggttgcaggatcctggagcctgtgaagaaggtgcgcgttggcgagaacctgatcgacacaaagaggagcatgcacaggatccataacaggacgcaggtcaggtttgagtttctgaaggatcccaggttcaggatatatctcagccattctgacgatcgcttctcacgggatctcagggatatgctggaggatcacagatgtgtgtacacaccatgcctgggcctgagccagctagtatgcaacttcaaattcgtcggcgagctgggtttgaggagatgcggtgatggattacaggaaataaacagcgttgtgcctctgaaatctcttctggagtcgccggagtttgaggagggcagggagtatttctcagagatcatgccctgcgttattggagagggacgggaggtcacggattacagtgaggtgctctacgagaggaacggagggagcatcagggccagaacaagagatgcgtgggagctggataatggggagagggtcgttttcatttaa

SEQ ID NO: 698 - protein, 233 aa, Methanosaeta thermophila
MRDSVLVFDVWGDYAHFRKIYTTSSPLTYSFPPRTAISGIIGAIAGLSKESYFRYFSRDKASIGCRILEPVKKVRVGENLIDTKRSMHRIHNRTQVRFEFLKDPRFRIYLSHSDDRFSRDLRDMLEDHRCVYTPCLGLSQLVCNFKFVGELGLRRCGDGLQEINSVVPLKSLLESPEFEEGREYFSEIMPCVIGEGREVTDYSEVLYERNGGSIRARTRDAWELDNGERVVFI

SEQ ID NO: 699 - DNA, 2415 bp, Methanosaeta thermophila
atggggagagggtcgttttcatttaaactcagatcccatcccgataagcttctggtggatcacctcagaaacgtcggggagatgtgcaggaggacagtggctgagagcgcacggaacctcgatgatgcggagattctgaagaatgtcgcatacatcatcggagcgacacacgatctcggaaaggcgacgggcttcttccaggagtacctgagggagactgatgagaaaaggaggcgggctctgagatcgagagatgtcacgaagcatggtcttctctcatcgctcttcacgtacgcaattgtcagggagcatctgaggaagagaggatgcgagatgcccggcgcacttcccctggtctcattcatcgcggtgaggcgccatcacggggatctgacgaacgcgctggatgagatctcggcgatctacgctgagagggagagggtcctatctgtgatcgaggagcaggtctccagtcttgacagaaacgaatgcgcgcagatattcaacgcccttctcggcggtgtggttgagatagatcttgattctcttttggaccacatcctcagagatgctctgaaggatttgaggggtgagaagccgcttgtcaggaatctcggcaggagaaatgatgttctgccatacttcgtggcccagctcctgtactccgcgcttctggatgcggacaagacagatgcagggctggagggcgtggatctgggcagggtgaatattcctccagatcttgtggacaggtacagggaggcgcgcgggttctccgagaggagagatggcatcaatggaatgaggaacgagatataccatgatgcagtcagccggatctcaggatgggacctcaatgagaggataatatcgctgaacgtgcccacaggtacaggcaagacgctgacatccctggcgatggcgctgcggctcaggagaaggctgatgaacgaacgtggggtcatgcccaggatagtatacgctctgccgtttctcagcataatcgatcagacatgcgatgtcttcgaggatgtgctggaaagcgcgggcatcagggctgactcaagcgtgcttctgaagcaccatcatctctccgacatcacatacacaaaaggggatgaggaattcgagtctgacgtgagccttctgctgatggagggatggaactctgagatcgtggttacgacgttctggcagctcttccacacgatattctcaaacagaaacagaaggcttcgcaagttcaacaggattgcaaattcaataataataatggatgaagttcaggctgtgccccacaggtactggcatcttctgcatgattctctgaaaatgctctgcgagaagttcaacagctatctgatactcgtcaccgcgacccagccgctgatcttctctgaggagagcggcgagatcagggaggctgtgagcgataaggagcggtacttcagagcgctcaacagggttgagctgcgccccatgatcgatgctcccatgagcctggaggaatttgaggctcttctggagggggagattcacaataacccggagaaggattttctcatcgtgctcaacaccatccgctcagccaggaatgtgtacagcgccataaaagctcttgatctgagggatacagagctgttttacctctccacgcatgtcgttcccagggatagaagggatcgcatacgcaggatcagagatgagcgtggagggcgcaggaagatcacagtgagcacgcagctcatagaggcgggtgttgatatcgatgctgatatcgtgttcagggatctcgcgcccctcgactcgataaatcaggtcgcgggaaggtgcaacaggaacctctcgaagggcagggggcgggtctcagttgtcatcctcagggatgagcggagggagctgtgcaggtacatctacgatggttttcttatctcaaaaacacttgacatattgaggtcgtgcggagaatgcatagaggaaagggagatactggagctgaacagcaggtacttcagggtggtgaggagcggcatgagcgatgagacctccaggaggtgcatgagcatgctatcaggcctggagtttggagatctcggggagagcttcaggctgatagaggaggatgagcccagggtggatgtttttgtggagacggatgagagggcctctgatgtctggcaggcttacagagatctcagatccgagagggatctctgggagaggagaaggagatacctgagacttagaaacgcactgagcgattacatgatctcccttccgaggagactcgctgcggatcttgtcgtggagaatcagggcactggctacatatcgatggacgaactccctcactactacgatccagagaccggcttcagggtggaggatgctggcgagggatctatgataatctga

SEQ ID NO: 700 - protein, 804 aa, Methanosaeta thermophila
MGRGSFSFKLRSHPDKLLVDHLRNVGEMCRRTVAESARNLDDAEILKNVAYIIGATHDLGKATGFFQEYLRETDEKRRRALRSRDVTKHGLLSSLFTYAIVREHLRKRGCEMPGALPLVSFIAVRRHHGDLTNALDEISAIYAERERVLSVIEEQVSSLDRNECAQIFNALLGGVVEIDLDSLLDHILRDALKDLRGEKPLVRNLGRRNDVLPYFVAQLLYSALLDADKTDAGLEGVDLGRVNIPPDLVDRYREARGFSERRDGINGMRNEIYHDAVSRISGWDLNERIISLNVPTGTGKTLTSLAMALRLRRRLMNERGVMPRIVYALPFLSIIDQTCDVFEDVLESAGIRADSSVLLKHHHLSDITYTKGDEEFESDVSLLLMEGWNSEIVVTTFWQLFHTIFSNRNRRLRKFNRIANSIIIMDEVQAVPHRYWHLLHDSLKMLCEKFNSYLILVTATQPLIFSEESGEIREAVSDKERYFRALNRVELRPMIDAPMSLEEFEALLEGEIHNNPEKDFLIVLNTIRSARNVYSAIKALDLRDTELFYLSTHVVPRDRRDRIRRIRDERGGRRKITVSTQLIEAGVDIDADIVFRDLAPLDSINQVAGRCNRNLSKGRGRVSVVILRDERRELCRYIYDGFLISKTLDILRSCGECIEEREILELNSRYFRVVRSGMSDETSRRCMSMLSGLEFGDLGESFRLIEEDEPRVDVFVETDERASDVWQAYRDLRSERDLWERRRRYLRLRNALSDYMISLPRRLAADLVVENQGTGYISMDELPHYYDPETGFRVEDAGEGSMII

SEQ ID NO: 701 - DNA, 843 bp, Methanosaeta thermophila
atggatctaaggattctgcggctgagactgcgctctgattcgcatgttaaggaggatgctgcgaagctgcgcggcttctttgccacgagcttcaatgatcagatgcttctgcatcatcatttcactgacagactgatctacaggtatccgctcatacagtacaagataatccagggtgttccggtcatcctggggataaacgagggcgcggatgttctcagggatgtatacgataagttcggcgagatccggcttggggatcggagctattctgttgttgagcggcatatatgcctgcggagggagaggtttgggtgtgctggagagcttcatgcgtacaggtttgtcactccctggcttgccctcaaccaggagaactacatgcgctatgcggatgcagcttcctggtatgagaggaaagagattctgaggaagatcctggttgggaacatactctctgctgcgaaaggtcttggatacacggtggatgagcagatacgtcttgagcttggcagggtgagggatgagatctgcatcttgaagggtgtaatggtcaccggcataaaatgcgagttcctgacgaactttcacattccggatctgatgggtctggggaagtctgtctcaaggggctttggggctgtgggggctctggagggcaggcgaagaaagcttgatgattgcggagatggagttacagagaggaatgaatttataaagggttcgataaattccactcatgccagagaccccctcgaaaaggagatctccaaggggagatctgccaaaaagaacgaaaaatcgccgctgtcgaagagcgagttccaggaaaacaaggattga

SEQ ID NO: 702 - protein, 280 aa, Methanosaeta thermophila
MDLRILRLRLRSDSHVKEDAAKLRGFFATSFNDQMLLHHHFTDRLIYRYPLIQYKIIQGVPVILGINEGADVLRDVYDKFGEIRLGDRSYSVVERHICLRRERFGCAGELHAYRFVTPWLALNQENYMRYADAASWYERKEILRKILVGNILSAAKGLGYTVDEQIRLELGRVRDEICILKGVMVTGIKCEFLTNFHIPDLMGLGKSVSRGFGAVGALEGRRRKLDDCGDGVTERNEFIKGSINSTHARDPLEKEISKGRSAKKNEKSPLSKSEFQENKD

SEQ ID NO: 703 - DNA, 270 bp, Methanosaeta thermophila
atggagagcgttgtcttctaccacatcggggtcgagtcgccgatcgcgccggatgaaccgctgccgccgctgccgcccatcccgcggggtgcgcttgtcgtcgtggaggggcgggcgccgatctggagatacggtctcgcccttcatcgcctccacggctctcccgcgggggcgatcgcggtttttgacccccgactcggcgcggtcgtcgtcgcgtcgcacacacctgcgtacaggcccgggcaggtggtcgatgtgacgccgccttag

SEQ ID NO: 704 - protein, 89 aa, Methanosaeta thermophila
MESVVFYHIGVESPIAPDEPLPPLPPIPRGALVVVEGRAPIWRYGLALHRLHGSPAGAIAVFDPRLGAVVVASHTPAYRPGQVVDVTPP

SEQ ID NO: 705 - DNA, 1215 bp, Methanosaeta thermophila
atgaaagcgatgctctgtcttatcagcgagcagcatgttccgaacctgctgggcgttcacgagctgcggccggatctcctcgtgctgcttgagaccgaggggatgaaaaggagggaggctgcaaacagattcctgaaagcccttgcgatcggaggtcaggattacctaacaagaaatgagatcgtgccgctggaggatggtgactcaatagaggagactgagagggcgctgaaaggggtctatgagagatacagagatgcggagtggatcgtgaacatcacaggcggcacgaagccgatgagcataggagcatacgggtttttcaggcaaaagaagaatgccaggataatctatgtctccgcgtctgaccagtcgagggcgctggacttctcgggtggagcggacatacctctgagccacaggatatctgtggctgagttcctcgcaggctatgggtttgatgtgctccattacgacaaggtccaggagaacgaggagcggagcaggaggtggcttggtcttgcagcagagatcgcggcgaggagccagaatggcgccattctcgggcttctcgcgaatttatcgaggatatcgaaagagcggaggggcaggtacaggggactcaagatctcagaatcagatggtctatttctgaacgatggtcatctgcgtgagatgatcgcttcgagctttggtctggcatgtgatggtgggcacttcacaggcgccctggataaatacgctgtcaggttcctcacaggcggctggcttgaggtcttcacatgggggttgctgagggggcttgatcgtgtctgggatgtgcatctcggtttgcagattggaatgaagaacgagaagctccagaacgatctggatgttgtgttcatgacagatcagtccctcaggatcgtggagtgcaagagcggcgggcaggagcacgacagggaggggagtgatacgctgtacaagattgaggcgatacggaagcagctcggagcacttcgtgttcgatcctatcttgtcacgacctctgataacgtgatcgattccgagaccggtaatatcaaggagcatctggaggacagatcgaggctctatgagtgcaacattgtgaagcctgaagatgttcgcagtcttgcgcagatgtacctcgcaggtgacgtgcggctgaacgcgagggttgcgcaggtcttcaacatacggcaggcggtttga

SEQ ID NO: 706 - protein, 404 aa, Methanosaeta thermophila
MKAMLCLISEQHVPNLLGVHELRPDLLVLLETEGMKRREAANRFLKALAIGGQDYLTRNEIVPLEDGDSIEETERALKGVYERYRDAEWIVNITGGTKPMSIGAYGFFRQKKNARIIYVSASDQSRALDFSGGADIPLSHRISVAEFLAGYGFDVLHYDKVQENEERSRRWLGLAAEIAARSQNGAILGLLANLSRISKERRGRYRGLKISESDGLFLNDGHLREMIASSFGLACDGGHFTGALDKYAVRFLTGGWLEVFTWGLLRGLDRVWDVHLGLQIGMKNEKLQNDLDVVFMTDQSLRIVECKSGGQEHDREGSDTLYKIEAIRKQLGALRVRSYLVTTSDNVIDSETGNIKEHLEDRSRLYECNIVKPEDVRSLAQMYLAGDVRLNARVAQVFNIRQAV

SEQ ID NO: 707 - DNA, 1026 bp, Methanosaeta thermophila
atgccactgcctctttacagaaccatctctgagcccaagtgtgtagaaggaaacgcagggctctggtacgacaagttctgcgacatgtggaacgatgatttcaacagcctgggggataacggcaagaaggagtggatcaggactgttgtgaggaatgtgggagatgaggctctcctcagggagatcaaggagcgtgtgatctccctgatctcaaattcgggcggaaaggccatgctcttcaggaccaccgcgccgttcgtcacaggcctcgggaggagccatcctgtggagaacggcttcgcgtggcaccacacgctcggcatcccgtaccttcctggctcatctgttaagggaattgtgaggggctgggcgcggctgtggaggaatctggacaacggggagatccgcaggatcttcggaccggatggcgcaggcagtgtgggatccgttatcttcctggacgccctgccggtcagacctgtggagctgaaggcggagataatgacgcctcactacgggccgtactacagaggtgataaacctccagagggctggcctgctgactggcacagccctgtgccgataccgttcctcgctgtcgctgagggccaggagttcctctttggggtgattccgagaaaagaagccactcaggactgcgagaaggtgatcggatggctcaaagaggcgctgcaggagatcggcgcgggcgcaaagaccgcagtcggatacggcaggttcgcctgcatcgaagcagagaccccagaggaagcggcgccagagcccatgacaccggggcgcgagtggctggagaagctcgccgaagaaatgggaaagagcgtggaggatttcgctaaagagtgcccaaaagtgctcgctgacaggtggaatgcgatcgagaatgatgagctcaaagggatggtccggcaggagatcatgcagatataccaatgcatgaatctctgggaagacgcgccctcaaagagcatgcgaaagactctggatcgttacaaggcctggagatga

SEQ ID NO: 708 - protein, 341 aa, Methanosaeta thermophila
MPLPLYRTISEPKCVEGNAGLWYDKFCDMWNDDFNSLGDNGKKEWIRTVVRNVGDEALLREIKERVISLISNSGGKAMLFRTTAPFVTGLGRSHPVENGFAWHHTLGIPYLPGSSVKGIVRGWARLWRNLDNGEIRRIFGPDGAGSVGSVIFLDALPVRPVELKAEIMTPHYGPYYRGDKPPEGWPADWHSPVPIPFLAVAEGQEFLFGVIPRKEATQDCEKVIGWLKEALQEIGAGAKTAVGYGRFACIEAETPEEAAPEPMTPGREWLEKLAEEMGKSVEDFAKECPKVLADRWNAIENDELKGMVRQEIMQIYQCMNLWEDAPSKSMRKTLDRYKAWR

SEQ ID NO: 709 - DNA, 402 bp, Methanosaeta thermophila
atgagtgagaggagtctggagcaggagcgtgcgaaacatgcgctggaggctgtgaactccatcaggggtgaaagctgggcgggcaaattccggagctatgtggagcgcctgcctcctgccatagtgatgaacggcctgggccaggcgatggctggcgagcttgcagctgcgggcagggcgggggagatgagtgacgacaaaaaagcccataacaagctctacgagctggtcgcgggctggattcgcacgaggagaatctactcagctgaggagaatctgatgaaggcgattgttgatggcgatcagaagcagtacgttctcgcccaggctgaggcgctggcgtaccttgaatggctgaagaagttcagccaggccttcctggagaaggataaggaggcgtga

SEQ ID NO: 710 - protein, 133 aa, Methanosaeta thermophila
MSERSLEQERAKHALEAVNSIRGESWAGKFRSYVERLPPAIVMNGLGQAMAGELAAAGRAGEMSDDKKAHNKLYELVAGWIRTRRIYSAEENLMKAIVDGDQKQYVLAQAEALAYLEWLKKFSQAFLEKDKEA

SEQ ID NO: 711 - DNA, 804 bp, Methanosaeta thermophila
atgagaggcatgatgctcggcatgcttgccgaaacccacatacattcaggagcaggcaggtctgagggttttgtggatctgcctgtggcgagagaggctgtgaccagctatccggtaatagctggatccagtctgaaaggcgcgctgagggacgctgccagagagagagggatggacgaatcgattttcggcgaccaggacagggcgggagatgtgctggtatccgacgccaggcttctcctccttccggtgaggagcctcaccggatcttacaggtgggtcacctgtccacacatcctggagaggctgagcagggacatgaggctctgcggcatatctgatggatttgagggagcgagcgttgaaaggggtaaagcctgctgcaccgacgatctaaatcagatcttcctggaggagagggagttccagagatctaacgggatagatggtgcgctgattgatgctctgaagaagatggtgcctcacaagcagaccgcatccaggctcgagaggcagcttgtgatcatcagcgatgatgatttcgggtggtttgccagctatggcctgcctgtgatcgccagaaacaagctggatgacaacaagaagagcaagaacctctggtacgaggaggcgctagctccagacaccctgatgtatgcgatggtattcgagcgcaaggatggtgcgctgggcaaagtgcagtctatgttcgagacgaagccctacctacagctcggcgggaacgagaccgtggggatggggtggtttgctgtgaagatcctggagcagggtgaggggagatga

SEQ ID NO: 712 - protein, 267 aa, Methanosaeta thermophila
MRGMMLGMLAETHIHSGAGRSEGFVDLPVAREAVTSYPVIAGSSLKGALRDAARERGMDESIFGDQDRAGDVLVSDARLLLLPVRSLTGSYRWVTCPHILERLSRDMRLCGISDGFEGASVERGKACCTDDLNQIFLEEREFQRSNGIDGALIDALKKMVPHKQTASRLERQLVIISDDDFGWFASYGLPVIARNKLDDNKKSKNLWYEEALAPDTLMYAMVFERKDGALGKVQSMFETKPYLQLGGNETVGMGWFAVKILEQGEGR

SEQ ID NO: 713 - DNA, 1077 bp, Methanosaeta thermophila
atgatttatctcagaatcaccccggtggattcctggttcttcagggacggaaggccgttccatttgggagaggcgacatcagacgttggggggctctttcccccaagcgcgttcactgtggtcggagcgataagggcgcacctcgcccggagcatgggctggcgtgaagggaagtggagtgaagagatctgcagggtgctcggggatgggtatgatctggctggtctcaggttcaggggaccgctgctctgcagggagggagatcgcggtccagagatgctgtatccagcgccgctgaacctactcgggaagaggaacgacagcgggtacgagatgaggctactccgtcccggggaggaggtggagtgcgatcttggaagggtcaggcttcccacagcggagaaaatcgatggcatgaagcagctgtcaggatacgtaaatggagatcagctgaaacaggtattgaggggagaggttccggagggacgggtgatcccgagggaggagttatgggggacggagtacgctgtcggtcttgagagagaaagggatacaagaacagctaaggaagcgcatctttactcgataaacaggatcaggcttgtgcgcggagtgcatctgatcatgggcgttgaggggatcgatgagggcctcctggaaaagctggacggcgcggtgatgcccatcggcggagaggggcggatggggtgtgtcgagatgctcagccccggaaaaggcgtctctgagatcaggcaggagatcgggccgatcgacggacgggtcagattcacgctggtgcatatcaccccggcgtttctggggaggtggccccgtccgggagagagcatccccggggttcctggggaggtcgtatcagcctgcgtggggcgagcccttcgcatcggtggctgggattctgttaacaggagacctgtggagctcaagccgttcattccaccgggatccgtctggttctgcgaggctgaggcggatgagctgaacgatgttatgagcgtgagcaggataggagagtacacaggatttggttttggagagattgctctaggcatttggtga

SEQ ID NO: 714 - protein, 358 aa, Methanosaeta thermophila
MIYLRITPVDSWFFRDGRPFHLGEATSDVGGLFPPSAFTVVGAIRAHLARSMGWREGKWSEEICRVLGDGYDLAGLRFRGPLLCREGDRGPEMLYPAPLNLLGKRNDSGYEMRLLRPGEEVECDLGRVRLPTAEKIDGMKQLSGYVNGDQLKQVLRGEVPEGRVIPREELWGTEYAVGLERERDTRTAKEAHLYSINRIRLVRGVHLIMGVEGIDEGLLEKLDGAVMPIGGEGRMGCVEMLSPGKGVSEIRQEIGPIDGRVRFTLVHITPAFLGRWPRPGESIPGVPGEVVSACVGRALRIGGWDSVNRRPVELKPFIPPGSVWFCEAEADELNDVMSVSRIGEYTGFGFGEIALGIW

SEQ ID NO: 715 - DNA, 1917 bp, Methanosaeta thermophila
atgagcatgagcgatagcagttccgaaataaacttcacaatcggtcctgttcaggggttcatcgcgcaggcgcgccgtacgagagacctctggagcggctcgtttctcctctcgtacctctccggatgcgccatggctgagatacggagatgtgatggcagaataaaggttccagatgtagagggagatcagctgctccgctggatcgagagtgatggtgagggtgcaccaccccggatcggcacacttcccaacaggttcgtggcatctgcggaagaccctgctggcgctgccagaagcgccgcggagggtgtgaggagcaggtggaagaagatcgcagactgtgtttggaataaatacgtggagggcgtcgcagatcagggaaagaacacgcgtgagatctgggagaggcaggtgaataacttctgggagatccactggacgatcggcgcgatggagggaatggaggcgcgcaagaactggaggatctgcacagactggtcagacggtcgaccgaccattgaatggggagatcactgcacgatcatgagcgactggcaggagatctcaggctatgtgagatccattgagaggaaaaagcaggatgatttctggaaagagatacgccaggagaccagcgggatggatctcagaagcgatgaacggctctgcgcgatcgccctgatcaagaggatgttcccatcggtggcagaggatgccataggatgggaggtctccgcggatcgctggccctccacgctctacgtggcagcgataccatggctcagtgctgtaattgaatcagctgagagggattatgcgaacgactacgcgaaaaaggcgtttagctatgcggagcacatacagagaaagggtgttgcagagcagatcttcggaaggaaagacctgttcctggagatcgatgcgaacttctaccacaccacctccctgaagaacccgaagagcaccccactcaaaatgaccccggaggatggggatgaaccggaggatgtgaggagaaggcgggaagagcttattgaatgccttgaggagctttacaataaaaaagggaaaccctctccattctacgccatgctcctcatggacggggacaacatggggaggctgatcagggagagtggagaggctgtgagcagagctcttgcatccttcgcaaaagatgttgagcgtgtcgtgcacgataaccttggagtcctggtgtacgcgggtggagacgacgtcctcgcgatgctgcctgttgaaagagcgatgagctgcgcgtacaggctctctgtcagtttcgcggagtcgttcgaagctcaggggatggaggcgaccatatcagcgggattggtcttcgccagccatcgcgtgccgctccgctctgttatgcgagaggcgcactccatcctggacgatatagcgaaggatgagaacggcaggggaagcatggctgtcagcgtcctcaagggcagcggcaggtactgcagatgggtcagctcctggaagggtgctgtatctccagagaacgaggtcgttctggagcggctggcgaagaatctctcagagaaacctgacggcatagaggcgtcgagctcgttcttctacaagtcgagagagctgctgctcatgctcgccggcgagcagagatggagcccgggaatgttcttcgatctctcacatctcggaggtctggatatagagacgctcctgcaggccgaatacctcaacgcgcttgagcacagatctgagataacagaggaggtacgcgacagcgcggtgagatacgtgagagatcttctttctgtgagccggaggcaccggggccctgagcatgagcgggcaactggcaaggagatctgcgcggatggcatgctgcttgtgaagttcctgtcacagaagggggttcaggaatga

SEQ ID NO: 716 - protein, 638 aa, Methanosaeta thermophila
MSMSDSSSEINFTIGPVQGFIAQARRTRDLWSGSFLLSYLSGCAMAEIRRCDGRIKVPDVEGDQLLRWIESDGEGAPPRIGTLPNRFVASAEDPAGAARSAAEGVRSRWKKIADCVWNKYVEGVADQGKNTREIWERQVNNFWEIHWTIGAMEGMEARKNWRICTDWSDGRPTIEWGDHCTIMSDWQEISGYVRSIERKKQDDFWKEIRQETSGMDLRSDERLCAIALIKRMFPSVAEDAIGWEVSADRWPSTLYVAAIPWLSAVIESAERDYANDYAKKAFSYAEHIQRKGVAEQIFGRKDLFLEIDANFYHTTSLKNPKSTPLKMTPEDGDEPEDVRRRREELIECLEELYNKKGKPSPFYAMLLMDGDNMGRLIRESGEAVSRALASFAKDVERVVHDNLGVLVYAGGDDVLAMLPVERAMSCAYRLSVSFAESFEAQGMEATISAGLVFASHRVPLRSVMREAHSILDDIAKDENGRGSMAVSVLKGSGRYCRWVSSWKGAVSPENEVVLERLAKNLSEKPDGIEASSSFFYKSRELLLMLAGEQRWSPGMFFDLSHLGGLDIETLLQAEYLNALEHRSEITEEVRDSAVRYVRDLLSVSRRHRGPEHERATGKEICADGMLLVKFLSQKGVQE

SEQ ID NO: 717 - DNA, 1266 bp, Methanosaeta thermophila
atgatagaggcgaagttccgtatcgttacaccgctcttcatgggcggggcagatcagagtacgccggagctgcgcgttccgggcataaagggtgccctcaggttctggtggcgcgctctcgcatggaactggtgtaaaggggatctcagcaagattcgagatctggagggccggatcttcgggagcacagagcacgggcagtccggggtgatcatggatctgtgtggagcgaatgcaaaattcacaaacgaaagcttttttgaaaaacgccagggcctgatgtacctgggatacggtcccatagagaagggaaagctgactcgagattatcttaaaccgcccgttgatgcgatattgaggatccggattcggccgaaaaatagcgatgagaaagctccttctgaatcaatcgcagatcagctctcgaaggccctgatcgccatgggcttatttggaggcctcggatcgagatcgaggagaggattcggctcgttcaatctgatcgagctgaatgtggacggcaaaacgaaattcaaatgccctaacagcaaagatcagctgaaggaagagatacggaagtttataaagtgtctgaatctgtacgacacgctcccagaatacaccgcttttagcccgaagacagagatatatctttttaaaaatatgaacaccgaccccttgggccttctggacggggttggcaatgcgatgattgagtatcgtctgggcacaagggggaagtcaagcggaaaaaggatacagagtagattcaaagcggacacagagctcgccaagaaaggattcaaagcggacacagcgctcgccaagaaaggattcaaagcggacacagcgctcgccaagaagatagctctgggggaacaggtaaacggacatccacggcgccttttcttcggtctgcctcacaactatcacttcaaggatctggaaaagaacctcgagataagaggtacaaaccacaatcgcagggcaagcccgctgctgatccacgtccagatggtgggcacgcagtacaccgcggttgcaaccctcatgcccgcgatgttcctgccatcagatgaacaaattctgataagggccacggaagaaaagaaaaaggatggtggttggaggatgtcggtggactccagcagcttcccggaatctcgcgtcaatctggacacagaagaggctgaggagctcatggtgatcagggatttccttaattcgagttttaagagggtgtatccaaatgagcatgagcgatag

SEQ ID NO: 718 - protein, 421 aa, Methanosaeta thermophila
MIEAKFRIVTPLFMGGADQSTPELRVPGIKGALRFWWRALAWNWCKGDLSKIRDLEGRIFGSTEHGQSGVIMDLCGANAKFTNESFFEKRQGLMYLGYGPIEKGKLTRDYLKPPVDAILRIRIRPKNSDEKAPSESIADQLSKALIAMGLFGGLGSRSRRGFGSFNLIELNVDGKTKFKCPNSKDQLKEEIRKFIKCLNLYDTLPEYTAFSPKTEIYLFKNMNTDPLGLLDGVGNAMIEYRLGTRGKSSGKRIQSRFKADTELAKKGFKADTALAKKGFKADTALAKKIALGEQVNGHPRRLFFGLPHNYHFKDLEKNLEIRGTNHNRRASPLLIHVQMVGTQYTAVATLMPAMFLPSDEQILIRATEEKKKDGGWRMSVDSSSFPESRVNLDTEEAEELMVIRDFLNSSFKRVYPNEHER

SEQ ID NO: 719 - DNA, 1752 bp, Methanosaeta thermophila
atgggttttagtttactgtgcattaactgccggctgaagatttgtatggatcgatacattatggataatcgcgttcttttgactgccctggggctcaacccaaaggagacgacgtacacactggggaacagaacctgcaagtccctcctgtcccctgtggctctgtacaatctgcttccggaagatgagcggttcgatagagtgctggccctctgcacggaggaggttctcgaaaagacgtttcccctgctcagggaggagctgcctgtcatgtgtgagcccacgcgtgtccacagcggcgtcagcgctggcgatcttcaggcgaccctgcataacatgctggagaagataccggagaaggcagagctcatcctggatgtgacgcacggcttcaggcactacccgtttctgttcttcaccgcatgcctgtatctgaaggctctgaaggatgttaagatcaaaaagatctggtacggaaggttggatgcaaagaaccctgatggtgcaacaccattcatcgatctgagcatcctccttgagatgatcgactggttccgagtcgttcagtccttcagggatatgagcaacccgaaggcccttgcggataagttgcttgcatacaagagagatgtgataaagccggatacgaacatacctccctccactaaaaagaaatacagcgcggtctccagcgctgcaaaggagttcgcagagctgttcggcataggccttccagtggagatcggcatggcttcagcagatctgcagaggctgatagaagagcttcgtgtggagggagatctttcagcaataaagatcctcctggcagaggatctgctgctggagatagaaaatgcagcagagcgcttcaggctgccagagggcgttgaaaagaaagatctcattctcgatatcggggagatccacaggcaggagaagctaatagatgcatacttcgaggcaggttaccacaacaacgctatcgggctgatcagagagcttatcataagcaggctaatgctcgaagatgaggatggcaggaatagctggctcgacaaatcacagcgagagaagatcgaacgatgtattggagccctcatggattacagcaaaaagaacagcgcagatcttacaaaagacaggaaagagcttgctggtatatggagctccgttatcgacgccagaaataagttgcaccattatgggatgacgaaagatattgtgagtgataaacaaatcgggatcccgaagtggtgggacgatctgaagcagcgtctcgacgacaattcgttttgggattgcggttttggaggtggctctggcaggcttctgatctcggcacttggccttcacccaggctttctctataccgctctgaggaatgtgaatccagagttatgcctggtgattgcatcacacgaaactgtgggcagatgggatgagctcgccagaatggccagttacagtggcgatttcgatgttaaggaaatggatgcacattcatttgacgatggcaaaaccatcgttgtcaactcaggggagcttctcgtcagattcgatgaggttgtgtgcaacctgacgggtggcacagctgccatgcagtatgcggtcatccagctggcaaggagggcagagcggttgggaagaaatgtcagatggatcgcggtcatcgataatcgttcaattgaggagcagaatctgaacccttacgtcgagggggaggtggtctttttggaggatgcagggatatga

SEQ ID NO: 720 - protein, 583 aa, Methanosaeta thermophila
MGFSLLCINCRLKICMDRYIMDNRVLLTALGLNPKETTYTLGNRTCKSLLSPVALYNLLPEDERFDRVLALCTEEVLEKTFPLLREELPVMCEPTRVHSGVSAGDLQATLHNMLEKIPEKAELILDVTHGFRHYPFLFFTACLYLKALKDVKIKKIWYGRLDAKNPDGATPFIDLSILLEMIDWFRVVQSFRDMSNPKALADKLLAYKRDVIKPDTNIPPSTKKKYSAVSSAAKEFAELFGIGLPVEIGMASADLQRLIEELRVEGDLSAIKILLAEDLLLEIENAAERFRLPEGVEKKDLILDIGEIHRQEKLIDAYFEAGYHNNAIGLIRELIISRLMLEDEDGRNSWLDKSQREKIERCIGALMDYSKKNSADLTKDRKELAGIWSSVIDARNKLHHYGMTKDIVSDKQIGIPKWWDDLKQRLDDNSFWDCGFGGGSGRLLISALGLHPGFLYTALRNVNPELCLVIASHETVGRWDELARMASYSGDFDVKEMDAHSFDDGKTIVVNSGELLVRFDEVVCNLTGGTAAMQYAVIQLARRAERLGRNVRWIAVIDNRSIEEQNLNPYVEGEVVFLEDAGI

SEQ ID NO: 721 - DNA, 24 bp, Methanothermobacter thermautotrophicus
gacaccctcactcctcatcctcag

SEQ ID NO: 722 - DNA, 864 bp, Methanothermobacter thermautotrophicus
atgaatagatctttagagcctgagaaagtatatgcaagagcccttgaccccgtccatataggggcaggtggttacagactgggaagagcagataacacaattgtaagggaaccatcgacggatattccaaaaatacctggaacctcgattgcaggagttacaagagagttctacacagcatacctggcggagaatgagttcggagataaaagtgctgaagaaaagagaaaacgtgcagaagaaaaggctaaatctatctttggcgatgaaaacaaaaaaggcgttctacgattctatgatggacagatattattcttccctgtctcctcagtcaggggcacagtatggatcacaacagaacaactttttaactactggtgtgtaaaagacgaaaaaataagctatgaagatgaaaataaggtctatgcgatcagaggggagctgaacggaagattgaatcttggctggttacttttcgaagtgaactcagaaaaaaaggaagatgttgatttaccagatgagataaatgaatggataaaaagggctgtcatagtacctgaaaatttattctctccgattgtaaatgataatcttgaagtgagaacatccgtacggatagatcccgaaaccggaacggcagtggaaggggcattgttcacttatgaggcgatacccagggggaccatctttggatttgaaattgccactgagaaagatgaaaagagaaaggaagtattaaatgctgtctcaccataccttaaatatctcgggataggtggaatggttacaaggggattcggcaggcttgaattagctgcagaacattctgaagatgaacaggtgggaactgatgttaaaccttga

SEQ ID NO: 723 - protein, 287 aa, Methanothermobacter thermautotrophicus
MNRSLEPEKVYARALDPVHIGAGGYRLGRADNTIVREPSTDIPKIPGTSIAGVTREFYTAYLAENEFGDKSAEEKRKRAEEKAKSIFGDENKKGVLRFYDGQILFFPVSSVRGTVWITTEQLFNYWCVKDEKISYEDENKVYAIRGELNGRLNLGWLLFEVNSEKKEDVDLPDEINEWIKRAVIVPENLFSPIVNDNLEVRTSVRIDPETGTAVEGALFTYEAIPRGTIFGFEIATEKDEKRKEVLNAVSPYLKYLGIGGMVTRGFGRLELAAEHSEDEQVGTDVKP

SEQ ID NO: 724 - DNA, 2874 bp, Methanothermobacter thermautotrophicus
atgagcaacattaaaaatatcagaaaaagaagaaaagaagtattgctaggagaaataggagccctgctccatgacatcggcaaactccatccaaattttatcgggaccaactctatagagaagatgccccctagattctttcatgcaaatattgatgattttttgaaaacagaactgatatcagctctaaaagcatttgaggacctggagattaatgttgagccaataagaatatacaacattatcagcgaacatcatagaaataacgttttacaaggatgtgatcgtaaagattccgcggatgacaagggtattgtaaggagaaaacagtccataacggatactgttatatcatcaccatttggttaccctaaagaaaaaatccatctgaattgtctccagaaagagtttgatgatctgcagacaatccttgtaagactttttaaatattacatctctggagttgtgaatttaagcctttttagaaggatgctaatgaaagaagcccaggtgtttttttctcatggtcttggagagacaagaattccatccaatgatgtcactctatgggatcattcatattcaactgcatcccggtttaagtctattctggtagcaaatctttgcggagcagatataaaagatccagaactgaggatattcggaatattctggaatggaatagaattcataaacaaagggaggaaaattgcagaaattaaagcaagaaaggaaatcattgagagaataaaagaaaaactaaaaggaaagtttgaggatgagattcccgttggaaattcaatctatgaagatataaatgggatttgtttcaccttcccggagtttgaccgggcggaagaactcgcaaatcaatgtgcgaaagaagctttgaagatttttttagaggagagtgaaaatgaattgtggccttttttcactttgagcaaaccctcaaagacgcttacagtacttgccagtgaacttaaattcgcatcctccagacgtgtttacccgaaaataacccccgcactttttatcgataaaaaacaaaaaaagataatagctgataatccagagatgccaatcccccaggaaggagaagatatttgccccctttgcaggttaagggcaaaacctattgagaaagagagatgtgagatttgcagtgaaagaatacggggaagattggcaaactggagtaacaaaaaagaaaacactatctggatagatgaggtggcagataaaaacaacaggattgctttaattgcattaaactttgaccttgataaatggtttgacgggacaatggtcggaaccatctattcacagacctacaaggactggaaacacagcaagaagtgggaaaagaaaaatgtaaagaaaaatgcaaatagtgttctaaatggtccaattgaagccatcaaggatcatgtttataagatactaaattatatattggaaaatgaagattcaaatgaggagaaagcagctaaattattagatactttcttcgaagaagagataggtctaagaaataaaaaagaccttaaaaaagaatttaaaaaccatcttcagaatataagagagaatataggagccgatctgaacaaagagaaccttgccacttatcttttcacccagaacccgtctcctgctcgattatacaggatctggaaagaaacagaggaattctttgacctgctaattaacaagataactgacatttacgcttaccgctggaaaaggataggattttccatagatacccatgaattaaaaggccgattaaaggaagagtacaagaatatcaaggagctggaaaaaggttccctgatcattaagataagcgggttagatccggaaacacttcttgtttttcacgacagaaacggagaattttacaccatagaatcccttggaaagttcaagttcaagaataaagtcggagaagaagcagttaaagaagcactaaaacagggtattaaacatctggccccagaggatgaaccagaaaaaaacctgatagaggtcggaaaaacaataaaaactgaggacaatctttatttcgaaaaatattacccgttaattgaaataaacagatcccccctatctcttcgattcatagtccctgctctggattcagtgaaaatcatagaaatgatagcagagttatacaataaaagattcgaaaaggtgctgggaaaactgccattgaatcttaaacttctcgtggcgaaaagaaagttcccactttacattctcctcgaagcagagaaaagaatgctcaaagatgaagaattcaaaaaacagacacctatggatccttggtggagtgtagagaggctggatgaacattacaatttttatccaataaaaccagcgaatggagaaaaatacaccctcgatgatctatcacgactatccagaggtaaaattttctacctctaccctggctattttgactttgaactgctctcagcaacgaccgacaggtacaacatatgctatgagggtaaaaagagaggtcatgaggatcacagattgttttcaggaagacccctttacttccatcagatcccacaaatacttgaattatgggatttattatccagcaacctttctaattctcaaataaatttcattgaaaaggcgctcacctcaaaattaagggaatggaaaaacgttaaagatgcgaataaggaaaatacattcagaatattcgcagaaacaacattaaaggatgcatttggacataaatgggatggattaagagaagaaaacagattcttcctcatatcctcctcaattaacatgcttttacttgataccatcaatctcttcactcatgttacggggtgcctgaaagatgaatag

SEQ ID NO: 725 - protein, 957 aa, Methanothermobacter thermautotrophicus
MSNIKNIRKRRKEVLLGEIGALLHDIGKLHPNFIGTNSIEKMPPRFFHANIDDFLKTELISALKAFEDLEINVEPIRIYNIISEHHRNNVLQGCDRKDSADDKGIVRRKQSITDTVISSPFGYPKEKIHLNCLQKEFDDLQTILVRLFKYYISGVVNLSLFRRMLMKEAQVFFSHGLGETRIPSNDVTLWDHSYSTASRFKSILVANLCGADIKDPELRIFGIFWNGIEFINKGRKIAEIKARKEIIERIKEKLKGKFEDEIPVGNSIYEDINGICFTFPEFDRAEELANQCAKEALKIFLEESENELWPFFTLSKPSKTLTVLASELKFASSRRVYPKITPALFIDKKQKKIIADNPEMPIPQEGEDICPLCRLRAKPIEKERCEICSERIRGRLANWSNKKENTIWIDEVADKNNRIALIALNFDLDKWFDGTMVGTIYSQTYKDWKHSKKWEKKNVKKNANSVLNGPIEAIKDHVYKILNYILENEDSNEEKAAKLLDTFFEEEIGLRNKKDLKKEFKNHLQNIRENIGADLNKENLATYLFTQNPSPARLYRIWKETEEFFDLLINKITDIYAYRWKRIGFSIDTHELKGRLKEEYKNIKELEKGSLIIKISGLDPETLLVFHDRNGEFYTIESLGKFKFKNKVGEEAVKEALKQGIKHLAPEDEPEKNLIEVGKTIKTEDNLYFEKYYPLIEINRSPLSLRFIVPALDSVKIIEMIAELYNKRFEKVLGKLPLNLKLLVAKRKFPLYILLEAEKRMLKDEEFKKQTPMDPWWSVERLDEHYNFYPIKPANGEKYTLDDLSRLSRGKIFYLYPGYFDFELLSATTDRYNICYEGKKRGHEDHRLFSGRPLYFHQIPQILELWDLLSSNLSNSQINFIEKALTSKLREWKNVKDANKENTFRIFAETTLKDAFGHKWDGLREENRFFLISSSINMLLLDTINLFTHVTGCLKDE

SEQ ID NO: 726 - DNA, 786 bp, Methanothermobacter thermautotrophicus
ttgaatttagatggggtatatgacttctatcttcatgaaaaagagggtggaatcgaagaaccaaaaagaaagattatggatgctgtggctggtgatcataaagatgacttcaaaacattttatccctcccccgatgatctgaattatcttcccatgaactcagttctcatcggattccagttcactcttaagaaaccctacacgagtagaggtgaatcaaaattttcagaaaacctcattgtgagggaccagttcacaggtctctgcatggtgagaccatccacatggaaggggaaccttagattcgcagccacaaaattaatgggccccaaaaattccattatcataagactttttggttcaaatcctgatagcgaggacatgataaaaggcagactttattttttccctacctttttcaaagaaggtgcagaaaatgatgtaataacaccattaaaaagagagacccggactccggcgagggggccaatacctcttgaggttatgaaacccggcaccaaaggagatttctaccttctctacgtcccttatctaggaaacgaaaattttggagatgagattaaagaggatctgaaacttatcgcggaagctttaaaattaatgttctatacctacgggttttcggcaaaaagaacatctggattcggggtaatagaaaagcaactggaaggaaagttgtggatgagaggaggtgtctctaagaatttctcaaacttgcatgagctatcagagattttggatggttatgggtatgagcaacattaa

SEQ ID NO: 727 - protein, 261 aa, Methanothermobacter thermautotrophicus
MNLDGVYDFYLHEKEGGIEEPKRKIMDAVAGDHKDDFKTFYPSPDDLNYLPMNSVLIGFQFTLKKPYTSRGESKFSENLIVRDQFTGLCMVRPSTWKGNLRFAATKLMGPKNSIIIRLFGSNPDSEDMIKGRLYFFPTFFKEGAENDVITPLKRETRTPARGPIPLEVMKPGTKGDFYLLYVPYLGNENFGDEIKEDLKLIAEALKLMFYTYGFSAKRTSGFGVIEKQLEGKLWMRGGVSKNFSNLHELSEILDGYGYEQH

SEQ ID NO: 728 - DNA, 756 bp, Methanothermobacter thermautotrophicus
atgagggggtgttccatgggaggacccagaacattcaatattgaactccagattttaaatgagatattcacagggggccctgaaagaagatcagaagttataagagatactggactcataggaagtctcagatggtggtatgaagcacttatcaggggtgtcggagggactgcctgcgatccttcacagggtccaccatgtgaagaaaggttacactgcgatgcctgtgaactattcggatgcagtggctggtccagaaagttcatattccgatcccgtgaagaatcagataagaccctcaaagtacagatcactgaacttagaagaatggaagatgtggagttagccctcctcaataaaacattaagtataatagaaaattacggtgccatcggaggcaaacttgcccataggaagtacggtatcataaagataaaagaaaatgaccttcgtgatttcacacttgagaaatcaatgctgcagggttacctccgaagggagggtccccacgttgataaccccaatttaaaaagattcatttttattaaaaacccaaacttccagctcgtaaagaggctcaaaaatgattgccgcttcctgaaggggtccagtaataggggtaagcgttacttcaacaaagatccaccaggaagtcgactttttgcctatgcaaatgaagatgaatatcccagactctgtgaatgtgcaggtgaagaagcaaagactggagaagaagttttaggggggcttatttga

SEQ ID NO: 729 - protein, 251 aa, Methanothermobacter thermautotrophicus
MRGCSMGGPRTFNIELQILNEIFTGGPERRSEVIRDTGLIGSLRWWYEALIRGVGGTACDPSQGPPCEERLHCDACELFGCSGWSRKFIFRSREESDKTLKVQITELRRMEDVELALLNKTLSIIENYGAIGGKLAHRKYGIIKIKENDLRDFTLEKSMLQGYLRREGPHVDNPNLKRFIFIKNPNFQLVKRLKNDCRFLKGSSNRGKRYFNKDPPGSRLFAYANEDEYPRLCECAGEEAKTGEEVLGGLI

SEQ ID NO: 730 - DNA, 30 bp, Pelotomaculum thermopropionicum
gtttttagcctgcctatgaggaattgaaac

SEQ ID NO: 731 - DNA, 1038 bp, Pelotomaculum thermopropionicum
atggaagtggaagttaaaaccctgactcctctttggaccggcggtgcaaaaagcggtgcagttgaccgggtacatgaaacaggtatcattggcagtttgcgctggtggtttgaagctatggtacgcgggatgggaggtaacgcatgtagcccagagcaagcggagcaaaaatgtatctatgatcctgaaaagcctaacaagggaatttgccatgtatgcgagatttttggtgccactggttggcggcgtcgctttcaacttatggttaacgattatactgagcctgaccattcaatcacaaaagtaatgctagaaaattgtcggtacattgacagtaaaggcaggacaagagtacccacttggtactttcctggtcgcctcgatgacaaaccgcggattggtagcctaacccttcggattcgtcaaacggcaccagatttccaaacggcaatcattggcggtttactccagtttatggccgactgggtagccataggagcgagagcgcaattggggtttggagtttttgagttgccaaacggtcggctcgatactagacccctctacgaacgactaattgcgaacgccggaaattgtacctataccaggctaccctcattgcagaacattttcttggctcgcatttggctggaaaacgctacagtgcaggatacctttaatcttaaatacgatatccgtcagcttttctcggggcaacaaaataagtctttgcgacatttcatcatgggtacgatcaaaggcgagcggttagtcgccaaggtcaaaatatcccgtccttatggtaatggtctgatacgtgtgtggggctggattccgaaagaggctggtgtctataagaatggctggaaccgagaaaaggttgtagacgcgatttaccagtacctgaggaagaattatactctggaggtttggcgagaaatggattctccgagggatactgttactcccaatattagtagtgcccaggcatttttgcggagcatattggggctgagggaggaagattatgaagcgtga

SEQ ID NO: 732 - protein, 345 aa, Pelotomaculum thermopropionicum
MEVEVKTLTPLWTGGAKSGAVDRVHETGIIGSLRWWFEAMVRGMGGNACSPEQAEQKCIYDPEKPNKGICHVCEIFGATGWRRRFQLMVNDYTEPDHSITKVMLENCRYIDSKGRTRVPTWYFPGRLDDKPRIGSLTLRIRQTAPDFQTAIIGGLLQFMADWVAIGARAQLGFGVFELPNGRLDTRPLYERLIANAGNCTYTRLPSLQNIFLARIWLENATVQDTFNLKYDIRQLFSGQQNKSLRHFIMGTIKGERLVAKVKISRPYGNGLIRVWGWIPKEAGVYKNGWNREKVVDAIYQYLRKNYTLEVWREMDSPRDTVTPNISSAQAFLRSILGLREEDYEA

SEQ ID NO: 733 - DNA, 1095 bp, Pelotomaculum thermopropionicum
atgaagcgtgattattacgtcttacagtggaaaaagttgaacagcaatatgagcgctctagagcaggctattattgcgctcgaagaggccaaaaaacgggacagcaatgaatacaagcgattggctataaagattattcagatagttgggcacccccatctagcctacttgtggtttgcggctattaaagccaaagttgctaacgcaatacgtgaagcctggcaagaagtattgcccgacactataaaggccattccggatgttttcggattcgttccggatgttgaggacgaggagaaattcatctttttaccgctgtatagcttcgccttaaagattcctttccaattggaaaagccttatatgagcagggatgacgttgatttttacctcctcgatagcccgctacgcaaagaaaaaattttcaaagtgcccacggtagcctccacaagctggaagggcgcgctgcgagcagcactttggcagttaggttatgaagaagataacgaggttatcatccgcctgctgggaaattcgcgcgaaagcgacgaaaaacaggccggccgcttgtacttttaccctaccttttttgacaaaatcagcttcgaagttatcaatccacatcaccatgaaacaggtgtgggacagggaccaatcttgatggagtgtgtgccgcggggagccgctggtatcctccagatcctttatgtgccttttgggcgtccggatcaaaacgagcgggagtgtcgtgccgaagttgccggtgacctggaggtactggttaagggtgtacacgccatgcttactacttgcggttttggggccaaaacgagcagtggttttggcacggtcaaagaccagttgaacgacaggggggcattaattcttcgggcaaaaacgactgatgcagatgttccgcctgctgaagattcaccgccctcctcagaagtcaatcatctggagtctaagcctgaggaaatcccccaattaaccgggaaaccacacgtttcaaagtggaccttcagcaccctgggcgaactatgccaggtggcccggcaggtagcagccaaactgcgggaaggaggcctaagatga

SEQ ID NO: 734 - protein, 364 aa, Pelotomaculum thermopropionicum
MKRDYYVLQWKKLNSNMSALEQAIIALEEAKKRDSNEYKRLAIKIIQIVGHPHLAYLWFAAIKAKVANAIREAWQEVLPDTIKAIPDVFGFVPDVEDEEKFIFLPLYSFALKIPFQLEKPYMSRDDVDFYLLDSPLRKEKIFKVPTVASTSWKGALRAALWQLGYEEDNEVIIRLLGNSRESDEKQAGRLYFYPTFFDKISFEVINPHHHETGVGQGPILMECVPRGAAGILQILYVPFGRPDQNERECRAEVAGDLEVLVKGVHAMLTTCGFGAKTSSGFGTVKDQLNDRGALILRAKTTDADVPPAEDSPPSSEVNHLESKPEEIPQLTGKPHVSKWTFSTLGELCQVARQVAAKLREGGLR

SEQ ID NO: 735 - DNA, 2877 bp, Pelotomaculum thermopropionicum
atgaatagttctttttggcgaccggataccaaccagaaacgtgccattttatttatggaagcactggggttaatccacgatttgggcaagctgagcgatacctttttgcaaagtcaggagccaaactcaacattagaatatatacataacctcctggtcgatccacgtcagattgatatttataaaaaccataggccaataccaaacaataaggctagcagtatgattgcggagtggttaagggatgccggaggcaaacctgccgcttttcaagaacgccctgacctgacatctcttctcttgaaccttcaatttgacgattggaccggcacaaaatattgtctggccgaattaatgcctctggttgcaagaccggctctagcaaggaaaactccttcttcagaatggggcaaggttcttggtaaggaaatgacaccgggtttgttgattggctatttacacggtgttgcccattttgaaaaacagggcgatccagatgataagaataagcaaccttattcggccgttttccgggccaccccttttggcctggaagaccggattgaaacggggaaaaatgagctaacaactacgcttaaatatttacccctgagcaatatcgagccaatcacctctaatcagcgccgtgattggctgcgagcaatggaagaaaacatgaagcgtggcctagccgatacccggcgaccccacaatgaagtttcgctgtgggattggggctatatgaccgctactctggccaaagctgccgcggcgtggatatttaaaaatggctggcctcgagataatgatctagggaaaatcccgtaccgaacactgtgcatcaccctcaacagactggtgctttattcccgctgtgacaaaataggtgatctactgggcgtgcgccaggtacttgatgaagcttaccgaaaggtccaaagactcttagaggaagaatatgccctggccaaccgcttttaccgtgatgagacgggagaatattatcttttccctgacctgggatacagcaacgaagagatgattgccctgcgcgaggcgattcaggcccagtttccgcctgatttacgaccgcaggttcacctgggtgaaccggttacggcaggccagctggatgatagtaacccgtcagcagtgagaaagctggtggccgaaccacgaggccagtcaatgcaggaacatactatgcgggctgggaataatctctgccttttcgaatgggaatggggtaacgggcgaccggaaaatgctgaaatctgtagtgcctgcggagtttacccgataggctaccctcgtgagggttcgagtcacgacctggaacggagcctaagttactgggctacacaggctgaagctcagcggcttcaggtgtgccgtgtctgtcttgaccgacgccggcgccgggctgaggattgggcgaagaataatttccaaggcaccatctggatcgatgaggtggctgatgacaacggtctggtggccttatttgtcggtaaattcgggttggaaggatggctggatggttcgcttgtctccaccataaaagtaactcacaacgaagttaaatatccctcgcccgccaggctgtaccgcatcgtcgaaacatgccgctctttctggcagcaggttaccgatgacttgacgcgcaaaaccgtcgggcagcggccgttccgcctggctctttatccagcgactaatgaagtgtcaaaattaggtaattttcatgcttacgaactgaaggcggacagcattgctctaagcgtgatctgggataaatcccacagacgcttccttaccatcgaaaatctaacgtatcttgccagccgctgccgtatacctgaagatgctcttatggacaaactccgtggcaacaatctgcatgttgtcgagccttccgaattcttaagtccagcccggacctcggcgaaagttcgggttgaacgcgtggataaactcaatggatatacgccgaccattcccctcctagctgaacccagcgtgtatatggcgatggtgccggctgtcaaagccttggagctggctcggaatgtaaaacgcaagtacgaagaagagatgggccgggtacgcgaccggctgcccatctaccttggtcttgttttcttccgacgccacacgccgcttcgggctgtactggaggccgggcgggccatgttgaacatggatggtggagacaagtgggaagggtggcggctggtggataaaaaccttaataatggtgtatgtgagctcgcctttgataatggaattacatggaaagtaccgacagtggcgggagacggccaaacaagagacgaatggtatccaagaatgtatgaaggtgacagccgagatagcaaaaaggtgaaacatgtcaatgatttacgggtgaggaacccccaaataccaccagacaaaggctggaaagtctgggtcaaacccagccggtttgattttgagttcctggacaccaacagccgccgttttgagatctactatgaccagaatggccggcgcccgcgccgcacccgccccttctacttggaggatctggaccgtttggatactctctggaccctactgaaattgaaattgccggctaaagctcaacgttaccaggttatccgtaccattgaggatacccggcaaaagtggtatggacgggatagagaagaagattcctggcacgacccggtattccagcagtttgtagccgataccctcgctcaagcggcgtggcctaagacgtggaaatggaccgagatcgaacaggacccgcagaaaaaacaactcattgaggctggcgttaaaggcgaattggccgacctggccgaattgtatatggaaattttaaaggaataa

SEQ ID NO: 736 - protein, 958 aa, Pelotomaculum thermopropionicum
MNSSFWRPDTNQKRAILFMEALGLIHDLGKLSDTFLQSQEPNSTLEYIHNLLVDPRQIDIYKNHRPIPNNKASSMIAEWLRDAGGKPAAFQERPDLTSLLLNLQFDDWTGTKYCLAELMPLVARPALARKTPSSEWGKVLGKEMTPGLLIGYLHGVAHFEKQGDPDDKNKQPYSAVFRATPFGLEDRIETGKNELTTTLKYLPLSNIEPITSNQRRDWLRAMEENMKRGLADTRRPHNEVSLWDWGYMTATLAKAAAAWIFKNGWPRDNDLGKIPYRTLCITLNRLVLYSRCDKIGDLLGVRQVLDEAYRKVQRLLEEEYALANRFYRDETGEYYLFPDLGYSNEEMIALREAIQAQFPPDLRPQVHLGEPVTAGQLDDSNPSAVRKLVAEPRGQSMQEHTMRAGNNLCLFEWEWGNGRPENAEICSACGVYPIGYPREGSSHDLERSLSYWATQAEAQRLQVCRVCLDRRRRRAEDWAKNNFQGTIWIDEVADDNGLVALFVGKFGLEGWLDGSLVSTIKVTHNEVKYPSPARLYRIVETCRSFWQQVTDDLTRKTVGQRPFRLALYPATNEVSKLGNFHAYELKADSIALSVIWDKSHRRFLTIENLTYLASRCRIPEDALMDKLRGNNLHVVEPSEFLSPARTSAKVRVERVDKLNGYTPTIPLLAEPSVYMAMVPAVKALELARNVKRKYEEEMGRVRDRLPIYLGLVFFRRHTPLRAVLEAGRAMLNMDGGDKWEGWRLVDKNLNNGVCELAFDNGITWKVPTVAGDGQTRDEWYPRMYEGDSRDSKKVKHVNDLRVRNPQIPPDKGWKVWVKPSRFDFEFLDTNSRRFEIYYDQNGRRPRRTRPFYLEDLDRLDTLWTLLKLKLPAKAQRYQVIRTIEDTRQKWYGRDREEDSWHDPVFQQFVADTLAQAAWPKTWKWTEIEQDPQKKQLIEAGVKGELADLAELYMEILKE

SEQ ID NO: 737 - DNA, 888 bp, Pelotomaculum thermopropionicum
ttgctgcgattaggtcgcacccctacaaccaagctcccatctgagacggtcctcaagctgcagactctctcccggctgcgctttgagttcgttcgccaagtcggcggactcaaaaacagggtactcggtatcctcgaccggatctttccggaataccccggctgtttctcagatgtctttatccggacctccagggagttgctcaagtcttaccccgaaccagaagaactagctacagtggacctttccgagttggccgctttcttaaaagagcattcccgcggccgcttcggtgaggaaagggccaaaaagatccagtctctggccaaaggtacttttggcattaccctggccctggacgcttttgctctccagctgcgtttactgctcgaacaaatcgaattcattgaagagcaggtaaaggttatcgaggaggcaattaacgaggtcatggaggaactccgtcctgacagggatactccctaccgccacgttattgaaaccatccccggtattggtcccgtcctggctgccgcaattatcggtgagataggcgatgtttctcgcttcccaaacgcccgggccctggtggcctatgccgggttggatgcttctgtcagggtctctgggctgtttgagggtacccgcaaccggatgtccaaacgcggctcccctatgctgaggaacagcttgtggctgtctgccgttttagcccggcgcttcaaccaggaattgaaggaatactacgagctaaaatgcagccagggaaagcattcaagcgttgctaccggggctgttgccagaagacttgtgcatttgatctacgctctttggaaagaaaaccggccatacgatcccaattaccagtggtccccacctagaaagtaa

SEQ ID NO: 738 - protein, 295 aa, Pelotomaculum thermopropionicum
MLRLGRTPTTKLPSETVLKLQTLSRLRFEFVRQVGGLKNRVLGILDRIFPEYPGCFSDVFIRTSRELLKSYPEPEELATVDLSELAAFLKEHSRGRFGEERAKKIQSLAKGTFGITLALDAFALQLRLLLEQIEFIEEQVKVIEEAINEVMEELRPDRDTPYRHVIETIPGIGPVLAAAIIGEIGDVSRFPNARALVAYAGLDASVRVSGLFEGTRNRMSKRGSPMLRNSLWLSAVLARRFNQELKEYYELKCSQGKHSSVATGAVARRLVHLIYALWKENRPYDPNYQWSPPRK

SEQ ID NO: 739 - DNA, 216 bp, Pelotomaculum thermopropionicum
atgttttacggtggcattgatgtggcaaagtaccgccacgaggtgtgccttcttgatgatgccggtaatgtcgtgctgcagatgcacatagacaacaaccagaagggaatgaacaagttcctgcaggcgctggaaaggctggatattgagcctgacagcgttaagttctgcctggaggctaccgacattactggctccccatttactgccacctaa

SEQ ID NO: 740 - protein, 71 aa, Pelotomaculum thermopropionicum
MFYGGIDVAKYRHEVCLLDDAGNVVLQMHIDNNQKGMNKFLQALERLDIEPDSVKFCLEATDITGSPFTAT

SEQ ID NO: 741 - DNA, 1002 bp, Pelotomaculum thermopropionicum
atggcaacatatgagaggcgacgttatttgtttatgaccaccgaccccgtacatgttggtactggtggctatcgcctggggcgggtagacttgagcattgttcgtgaacccggtacccgagtgcccaagattccgggtaccagcctgcacggcgcggcgcgcgcctactccgccagaatatacgaaagccccgcctgtgcgggacagggaactaaccaggaagggcgaagcggacactgtggccgagacgattgtccgatttgctataccttcggctatcttagccgaaaaacagatcaggaagacagcaccgtgggctattcaggcgtggtcaatgtttttgacgcccgtgtgctgctgtttccggtgtattccatggccgggccagtctgggtgagtacggtggatataatgcaggatgcgggttttaaggtaaccaacgtgccttcaaactggaatgtcggcactgccttgttgacctgggagagaaatgacgctctcaatttgggatggctgatggttgaaatagctggaaaagtattggttactgcttcgcaagagtggagtaaggacgaacgctggaagcaagtgcaagacaaaattgttctggtgcagcccgctcttttcagtcaggtggtcaacagtaacctggaggtacgcacatccgttgccatagatccggaacggggagcagcagaggacaaagccctctatacttatgaggccttgccacgtgccacctttctcacctgtgaggttgtgctggatgattaccgcgacgggtttcctaaagatgacggaaagaatccgttacaaggaaagaaaaaatgggaaggtcctttagacgtgctggatgccggcctacgcatgattgaatggcttggtgttggcggtatgggtacccgcggcttcggccgcctggcagtagttggacaaactattagcaacgtatggccagatgaggagggtcaaaaaaatgagcaacagcatggcacaagctaa

SEQ ID NO: 742 - protein, 333 aa, Pelotomaculum thermopropionicum
MATYERRRYLFMTTDPVHVGTGGYRLGRVDLSIVREPGTRVPKIPGTSLHGAARAYSARIYESPACAGQGTNQEGRSGHCGRDDCPICYTFGYLSRKTDQEDSTVGYSGVVNVFDARVLLFPVYSMAGPVWVSTVDIMQDAGFKVTNVPSNWNVGTALLTWERNDALNLGWLMVEIAGKVLVTASQEWSKDERWKQVQDKIVLVQPALFSQVVNSNLEVRTSVAIDPERGAAEDKALYTYEALPRATFLTCEVVLDDYRDGFPKDDGKNPLQGKKKWEGPLDVLDAGLRMIEWLGVGGMGTRGFGRLAVVGQTISNVWPDEEGQKNEQQHGTS

SEQ ID NO: 743 - DNA, 30 bp, Pelotomaculum thermopropionicum; identical to SEQ ID NO: 730

SEQ ID NO: 744 - DNA, 324 bp, Pelotomaculum thermopropionicum
ttggatgggatagtcagttggcatgttattgcttttataaataaggctggtgaccctaccttgtttgttatcctggtttacgatgtcaaccaaaaaagggtggccagggtcctgaaaaagtgccgccagtaccttaattgggtccagaactctgtactcgaaggggagatttccgaagctaatttaaagaagttgaagatggaactggagagaattattaggaaagatgaggactcggttattttttatcatcttcgtacgacgaaatattcttcccgtgaaataataggcttgaagaaaggcggggatgaaaatataatttga

SEQ ID NO: 745 - protein, 107 aa, Pelotomaculum thermopropionicum
MDGIVSWHVIAFINKAGDPTLFVILVYDVNQKRVARVLKKCRQYLNWVQNSVLEGEISEANLKKLKMELERIIRKDEDSVIFYHLRTTKYSSREIIGLKKGGDENII

SEQ ID NO: 746 - DNA, 1035 bp, Pelotomaculum thermopropionicum
ttgctggtcctgatctttataaacgggcgggggtggttctatatgaaaaaaaccctttacatcttctccaatggcgagctttcccgcaaagacaacactctttactttgaaacggaggaaggcaggcgcttcatcccggtcgaggataccggtgagataatgattttcggcgaagtggacgtaaacaagaagctcctggaatttctttccgtaaaagagatcaccctgcactttttcaattaccacggatattacatgggatccttctacccgcgcgagcatttgaactccggctacatgactttaaaacaggcggagcactacctggacgaagaaaagcgcctggtcatagcgaaggaaattgtgcgtggcgcggccaaaaacatcagacaggtactgaaatactactatggcagggaaaaggacgtgggaggcaagttaaatgcaatagaaaatttaatggctcccatagaagaatgccgggacacgtcgtctctgatggcgctggagggaaacatccgcgaccattactaccgggctttcgacgaaatagtggacaaccccgacttcgcgtttcaggagcgcagccgccgcccgcccaaaaattatttgaacaccctgatcagtttcggcaattccctcatttacaccatctgccttagcgaaatctacaaaacccacctggacccccgcattggctacctgcacgccaccaacttccgccgttttacgctgaacctggacatagccgaaatatttaagccgataatagtggacaggctgatttttactctactgggaaagaaaatgattacaaaggaagacttcgaccggggtacggaaggtataatgatgaaagaaaaggctagaaaatgttttgtggagaatcttgacgagaaactgaagacaaccatcaatcacagggaaataggacggccggtctcttaccgcaggttgatccggttggagctgtacaaactggaaaaacacctgatgggtgaaaaggagtaccaggcctttgtggccaggtggtaa

SEQ ID NO: 747 - protein, 344 aa, Pelotomaculum thermopropionicum
MLVLIFINGRGWFYMKKTLYIFSNGELSRKDNTLYFETEEGRRFIPVEDTGEIMIFGEVDVNKKLLEFLSVKEITLHFFNYHGYYMGSFYPREHLNSGYMTLKQAEHYLDEEKRLVIAKEIVRGAAKNIRQVLKYYYGREKDVGGKLNAIENLMAPIEECRDTSSLMALEGNIRDHYYRAFDEIVDNPDFAFQERSRRPPKNYLNTLISFGNSLIYTICLSEIYKTHLDPRIGYLHATNFRRFTLNLDIAEIFKPIIVDRLIFTLLGKKMITKEDFDRGTEGIMMKEKARKCFVENLDEKLKTTINHREIGRPVSYRRLIRLELYKLEKHLMGEKEYQAFVARW

SEQ ID NO: 748 - DNA, 504 bp, Pelotomaculum thermopropionicum
atggaccaggaaatcaacgtcagcggcactctggtttggtactattacatatgccccagggaggtatggctgataggccaccagatcaacccggacgaagatgacgccaatgtgagcctgggacgcttcattcaggattactcttacccgcgcgagcgcaaagaattgctggtgggtcacagcaaaatggatgtttttcgtgccagcgatgaaggcctggtcatcggggaagtcaaaaaaagctccaagtaccgcaacagcgcccgcatgcagctggcgttctacctgagcgaattaaagcagcgcggcatcgtggccaggggagaattgcgtttccccagggaaaagcgcagagaagaagtggtgctggatgaacaaacggagctggaactggacagggtgcgccgggagatcctgcgcatcctttacctgcccgcaccgccggcgccggtgaaaataaacttttgtaagaagtgcgcttacgctgaattttgctggtcctga

SEQ ID NO: 749 - protein, 167 aa, Pelotomaculum thermopropionicum
MDQEINVSGTLVWYYYICPREVWLIGHQINPDEDDANVSLGRFIQDYSYPRERKELLVGHSKMDVFRASDEGLVIGEVKKSSKYRNSARMQLAFYLSELKQRGIVARGELRFPREKRREEVVLDEQTELELDRVRREILRILYLPAPPAPVKINFCKKCAYAEFCWS

SEQ ID NO: 750 - DNA, 2418 bp, Pelotomaculum thermopropionicum
atgcctgtggtaaaaggcttcccgctggaagaatgtatcgcccgaccggccgatggtggcaaaacataccctctaaaggagcacctgttggccgtggctgaggcctgtggcagcacggccggagaccgcccagagcggctcaggtttttggcagggctgttgcacgacgcggggaaaagcagcagaccctggcagaactatattcaggggaagaccaaaaaaggcatgccccacgcctttgcgggggccatgctctttgccgctctttttgccgaccttctggaagtctggcagcctgccaggcaggagagaaagagactgtgccacctggccgtcaacctgacccaattcctgtacaaccaccacggcaggatcgaggatgtaaacggagattttccgccatggaccggaatcattgcacccaccgagattatggaggtggacgttccgggtttgctgaatctggtggcactttactttccggaaattgatgacaggttgcaaatgtacaataagaagccacagtctttggtggaaaaaatatcctccatagccggcccagattgctggcccaggtgggccactgagatggccacctgggtggaaaaattgttaaaggagggaaatccttacgagataggtgcgcgcctctgtctccagcaagagaattcccgcctgatcactgcagaccgcctgcacgccggcgatttcctcgctgacgataataatttcctgactccggcccgggccgtctcggccttggacagcatccagcggtattgcagcggacgcaggagtgaaatgaccgggcaggccgaccggtcaattctggaggtcagggaaaaatggcgccagattgcggtggagagttttctgaaagaagagcgggagaaaatgttcaccctggaactgcccacgggttacggcaagaccatggccgccctctccgtagccctccgggccgtcgcgaggggcctgtgcaggaggattatctacgtagcgccttatctctccattttatcccaggcagcactggaaataaaaagggccagcgggcttcccgtgctcacccaccaccacctctccgtcctgcagggtctggtggagcatgaactggcggaagacctgctcctggaaacctggcaggcgccggtggtggccaccaccttcaaccagctcttcctggccctctttccttaccgtgcccaaaataccctgcggctggtcggcctgaggaatgcctttgtaattgtagacgaacctcagatcatcaacgctgacgcctggaacctttttctggcgttggctgaagctgctactgccgaacttggctcgaaatttttgtttgtcaccgccaccatgccccgcaccgacggtggagtttttggccgggtggtttccctgggccgggctgaacctgtttcaaatcgctaccaggtggaagtcggtgatactgaggatgaaaattccctggccgaaaaagtgcttaagtcctacaacacttgcggttccacggcggccattttaaacactgtacgggatgctgctgaagtttaccggcggttgtgcggcgaggttcatgaaggcgaattatactttctctccgggcgaatgacgcctctgcataaaaaagagaaaatcgccgccatcaaatcctctttaaaaaacggccggggtgccctggttgtgtgcacccaggttttagaagccggggtggacttaagtttcagagagttattccgggctctgccggtgatcccatcgctggtgcaggcggcaggacgcgtaaaccggcatggtgaaggggagaaaggtaaactttttatctttgagtttttgcgcggcggggaaaagaaaaccagaccttatgtctacaggggcggggagcagcgggaggtcaccgacatctgcctggccgaaaacagggtgtttgacgaagctacagccggccgactggtccaccggtattaccagatgtgctttcagcgcaacacccgccagacaccgctggaaaaaatcctggaaggcgcccggggttattacaccgcaccggcgggactgagcccttttggccggcaggtgccccagtacggtatctttgttcctctcgtttttggcgaattgcctccagaagtggacctggccatgaaaagattcggctgccataacccggacgagatctgggacagatatgccgccaaagggtttttgtcttccctggaatatacggataaaaagcagttcatggggttgatgcagcactttatcgtccagttaccggaggaaacggccagggaagtgggagagccggtggaaaagagagccattttgcgcattaagggagagtcgctttactccagggaaacaggcctttcctatgttgctacagatgatgaaaaagagatctggttcatttag

SEQ ID NO: 751 - protein, 805 aa, Pelotomaculum thermopropionicum
MPVVKGFPLEECIARPADGGKTYPLKEHLLAVAEACGSTAGDRPERLRFLAGLLHDAGKSSRPWQNYIQGKTKKGMPHAFAGAMLFAALFADLLEVWQPARQERKRLCHLAVNLTQFLYNHHGRIEDVNGDFPPWTGIIAPTEIMEVDVPGLLNLVALYFPEIDDRLQMYNKKPQSLVEKISSIAGPDCWPRWATEMATWVEKLLKEGNPYEIGARLCLQQENSRLITADRLHAGDFLADDNNFLTPARAVSALDSIQRYCSGRRSEMTGQADRSILEVREKWRQIAVESFLKEEREKMFTLELPTGYGKTMAALSVALRAVARGLCRRIIYVAPYLSILSQAALEIKRASGLPVLTHHHLSVLQGLVEHELAEDLLLETWQAPVVATTFNQLFLALFPYRAQNTLRLVGLRNAFVIVDEPQIINADAWNLFLALAEAATAELGSKFLFVTATMPRTDGGVFGRVVSLGRAEPVSNRYQVEVGDTEDENSLAEKVLKSYNTCGSTAAILNTVRDAAEVYRRLCGEVHEGELYFLSGRMTPLHKKEKIAAIKSSLKNGRGALVVCTQVLEAGVDLSFRELFRALPVIPSLVQAAGRVNRHGEGEKGKLFIFEFLRGGEKKTRPYVYRGGEQREVTDICLAENRVFDEATAGRLVHRYYQMCFQRNTRQTPLEKILEGARGYYTAPAGLSPFGRQVPQYGIFVPLVFGELPPEVDLAMKRFGCHNPDEIWDRYAAKGFLSSLEYTDKKQFMGLMQHFIVQLPEETAREVGEPVEKRAILRIKGESLYSRETGLSYVATDDEKEIWFI

SEQ ID NO: 752 - DNA, 729 bp, Pelotomaculum thermopropionicum
atgtatgaccaagtactggtttttagcattaaaggctccctggctcattttcgtcaacccgatactaccgctacccatgctacctaccctttcccccccaggcccacaatccacggcctgctggcttcggtgctgggtctggactttgatgacgaagcaggagcggcctttttgcatgaagaacactttgtgggtctttccctgttgaagccggtgcgtacagtatgtgcccagatgtccatgcacgggaagggcttcaccgggggtgggggagattcttttaacaggctgactactattgaactggtggtgtcgccccactacctggtatattacaccggcagcaggctgggtgaacttgcagagcggatccggacgggacaaagcgtttaccatacttacctggggtcggcctactgccttaccttcccggtttttcacggcctttatccgctgctggaggtagctcctggtgaagaggagcctttgccctgttcatctgtggtgcctcagggggttattcaagaaattttagttgagccgggaggtaattacgccgtggccagggcccttccctaccgccacgtcggcggccggttttttgaacggacgttgaatgtcatttacgaagtaaatggcaagcctcttaaagtaaaagtccgaaaggtaccggaaatcgcctgtaaatttttgaaattgcctgagggcaaggtggtatgcctgtggtaa

SEQ ID NO: 753 - protein, 242 aa, Pelotomaculum thermopropionicum
MYDQVLVFSIKGSLAHFRQPDTTATHATYPFPPRPTIHGLLASVLGLDFDDEAGAAFLHEEHFVGLSLLKPVRTVCAQMSMHGKGFTGGGGDSFNRLTTIELVVSPHYLVYYTGSRLGELAERIRTGQSVYHTYLGSAYCLTFPVFHGLYPLLEVAPGEEEPLPCSSVVPQGVIQEILVEPGGNYAVARALPYRHVGGRFFERTLNVIYEVNGKPLKVKVRKVPEIACKFLKLPEGKVVCLW

SEQ ID NO: 754 - DNA, 969 bp, Pelotomaculum thermopropionicum
atggcagttaacagtggggaaattttgtttgtcaaggctgtgaaggacgggataccaaaccgggaccccttgaatgactccgacgccaggcgcattttcggtgaggacgacggcaggatatccctttccgacgtcagcattaaaagggacgtgcgggactatgtattggccaaatacccggacgggggcggtaagggcggcagctactacgttttctgccgggaagagagaacgcccgatggcaagctgctggggcgggaccggctggcggaggccattttggaaagggcgggccgcaaggatcacccggacaagcctgctgccttactggagtctgccttcgatatgcgggtttttggtgccgttttcagtgtgtccaaaaagagttttcataagaccggcccggttcagtttggctgggcacattccctgcacccggtggaaaccaggtatgtccagggaacggtggtcatgcctagtcgtgacgttagtgatgccggtgaagatgaagggaaagaacagggtaccatctggaccacttacactctgccctttgccgtctttgccatgccgggagtgatcaatgcctccatagcggaagagactaaaatgagcgaggacgacctggagctgctgctggagggactctggaagggcacattgcacaggcaggcccgcggccggggcattcagcagcctctcttgttaattcacgtggaatataaagacaggtttttccgcatcggttacctggaggaatacctcaacctggagccggggcgagaggcctggcttggtggacagccgcccacatccctggaggaagtgaccctggatatttcaaaattagccggcctcatcggcagtaacagccctcactgcgacaagattgccagggtgcgctggataaaaactccaggcttaaagacaaaaggtgaattgccgggggaagagttgaaaatgtggtag

SEQ ID NO: 755 - protein, 322 aa, Pelotomaculum thermopropionicum
MAVNSGEILFVKAVKDGIPNRDPLNDSDARRIFGEDDGRISLSDVSIKRDVRDYVLAKYPDGGGKGGSYYVFCREERTPDGKLLGRDRLAEAILERAGRKDHPDKPAALLESAFDMRVFGAVFSVSKKSFHKTGPVQFGWAHSLHPVETRYVQGTVVMPSRDVSDAGEDEGKEQGTIWTTYTLPFAVFAMPGVINASIAEETKMSEDDLELLLEGLWKGTLHRQARGRGIQQPLLLIHVEYKDRFFRIGYLEEYLNLEPGREAWLGGQPPTSLEEVTLDISKLAGLIGSNSPHCDKIARVRWIKTPGLKTKGELPGEELKMW

SEQ ID NO: 756 - DNA, 2079 bp, Pelotomaculum thermopropionicum
ttggtttctatcggtggacctttcctggctcacggcatgacagctgccgagacactccaccaggttacggatgtctctactgacggaaggtttctcgaaaatgtcatcgttgttgagttagctcgcgaggaagaacggctgaagtacgctatcttgcccctcatgacctggggaggatatgatgaagtagagggtgggggaaaaaagaaaggcggcaagaaaaaaaaggcggcattcgtagcggataccgctcgcggcctagccctgccctatgccctggcttccggaggcaatcccaccgtgccccaggggcgctacggagtagccgtatacccggcttaccccaatagtgtatccaaaatgacgatctcagacgaggtagccaggtttctccgcaagaggctggataaaaccctcaacttgcctgtagacatagctggtagtgatctagatgccattgccagacaggttagcggcttgatagaaaaagtgaacgaaaaagtgataactaaggagaatcaggggtacgccctgattgccctgatatttcctgatagcggcggtccttatctttatgttaatagagcgccggtaaagggcgaccgccagtacatcctggtaggtgaaagtatactctttccgggtaaatatatcgtcgccgacattgccaggttagagaagtacttttgggagtccaagatggccgaggggatggagaagggacggcgggaaaaatgctctatctgcggcaggcaggaagaggcggtttcaccttattgtaaagcctggaactggctgagttatacctgggacgcacccctttcggagaaattccggggtgacgagccggatctggccggagcagtgggagccttgtgccggtcgtgctattcctccttgatcatgggagcaggtatattcagtgagatttcatctcctttaccttattatctcacaaaagagctttttctcccggtggcctcggcagccggcagggatgcagccaaaaagtccaaagccagacctccagccatctacggctgcgccctcattttacccttccggagaggaatagacgttgctgagagcggggagatgctgaaggaggctctggatgcctttcgcagcaaaaacatgcgcaaggataaaaacgacctggcccttgccgctatcaccggttttgaagctgttttacccggtgacttcaacagcgacgattaccgcctgaccatcgtttactaccaggcatcccaggccgatgttcagctgcgggcggtgatcgaggatgtgctgccttccacggtgagaattctggccgactatatgccccaggtggccgacgaggcggcggaagtcaagcgaaagatagccgttacagaagccgacttcacggcggacaattaccgctccttagtatatatcttaattagggcctatggcggcggctacctgtggcacaccctgcagtctgttttaaaccggcggccgttgagcagggaaaggtttatgcggggggctgctctgcgtatgaacggttatgccggccggtctgacgacagttctttctggagtttaagggaagaggtggctttttacctggctttcaggagatttttgaacttctatagcaaagagattttaaaggagggttccgctgtgccagactggcgtcaaatgctggacaagatcaccaaaacagcacctgaccaattaactttcagtagtgtggaagaactgggctttgctgctgggtacctcaccaaccgttttgggcgctggtattattataataccggtgggggtaaggaaaaaaagccagagggaaaggattttatcaaacaccgggtaatgacttttggttccaggctaactccggacatggtctggcgcaaggccctaagccgctttcaggaatatgcctttaagctggacatcaatatgcctgatgattttcgacgccgcgccggggtggtggagagcgaattcagacgtctacgccagcaggtggaaagaaaccgggatgagtttatgggtgccttttggagcggctatatgctggcccccgaggccgataaatag

SEQ ID NO: 757 - protein, 692 aa, Pelotomaculum thermopropionicum
MVSIGGPFLAHGMTAAETLHQVTDVSTDGRFLENVIVVELAREEERLKYAILPLMTWGGYDEVEGGGKKKGGKKKKAAFVADTARGLALPYALASGGNPTVPQGRYGVAVYPAYPNSVSKMTISDEVARFLRKRLDKTLNLPVDIAGSDLDAIARQVSGLIEKVNEKVITKENQGYALIALIFPDSGGPYLYVNRAPVKGDRQYILVGESILFPGKYIVADIARLEKYFWESKMAEGMEKGRREKCSICGRQEEAVSPYCKAWNWLSYTWDAPLSEKFRGDEPDLAGAVGALCRSCYSSLIMGAGIFSEISSPLPYYLTKELFLPVASAAGRDAAKKSKARPPAIYGCALILPFRRGIDVAESGEMLKEALDAFRSKNMRKDKNDLALAAITGFEAVLPGDFNSDDYRLTIVYYQASQADVQLRAVIEDVLPSTVRILADYMPQVADEAAEVKRKIAVTEADFTADNYRSLVYILIRAYGGGYLWHTLQSVLNRRPLSRERFMRGAALRMNGYAGRSDDSSFWSLREEVAFYLAFRRFLNFYSKEILKEGSAVPDWRQMLDKITKTAPDQLTFSSVEELGFAAGYLTNRFGRWYYYNTGGGKEKKPEGKDFIKHRVMTFGSRLTPDMVWRKALSRFQEYAFKLDINMPDDFRRRAGVVESEFRRLRQQVERNRDEFMGAFWSGYMLAPEADK

SEQ ID NO: 758 - DNA, 900 bp, Pelotomaculum thermopropionicum
atgctagacaaaacccgccgaaaagcccttttctggagcgtgcctgaagatgttttagaaaacccggattttgccacgtggcggactaaaacaatcctttgcgagggactggcaggcgacatcagcctgcttgacaaacagcatatcgaacaggctctcgcccaaagatttcttcctgttcgtatcaaaaaactctggtccgagtattttgaatccgaagcggaaagaaaggaatccgatatgaaacttaccgcgcttcagaaaaaaactctcaaaattttttccagggttaacaaacatggtgatttttacttcaccggaggtactgctctcgccgtttgttacctccgccaccgggagtcggatgacctggatttctttaccggtgaacccacttctctcaacccaacagcgcgggatttcgaaaaaactttgcgttcagcggggctgaatgtacagattgaaagacggcaggccaccttcgtcaggttcttgatcgaacaagagctaaaagtagacatggccctggatgcccccttccggctcaagccgccggtacaatcaaacatcgaaggaatcaaggtgcccgtggacgacctggaagatattgcggccaataaaatgctggcactcttcggccgggccgagccccgtgattttgtcgacgtttattttttggcaaaagaatacttcgacttcatggagatggtacaaatggcggcgaaaaaagacaccggctttgatttgtactggcttgccgcggccatgcaggaggcggagaaaataagcctgctgccggttaaaatgcacaaaccgttcgacctctcagacatgaaaaatttcttcaaagaacagcgactcaagttactcaggcgtatcgttgaacaaaagaacaattaa

SEQ ID NO: 759 - protein, 299 aa, Pelotomaculum thermopropionicum
MLDKTRRKALFWSVPEDVLENPDFATWRTKTILCEGLAGDISLLDKQHIEQALAQRFLPVRIKKLWSEYFESEAERKESDMKLTALQKKTLKIFSRVNKHGDFYFTGGTALAVCYLRHRESDDLDFFTGEPTSLNPTARDFEKTLRSAGLNVQIERRQATFVRFLIEQELKVDMALDAPFRLKPPVQSNIEGIKVPVDDLEDIAANKMLALFGRAEPRDFVDVYFLAKEYFDFMEMVQMAAKKDTGFDLYWLAAAMQEAEKISLLPVKMHKPFDLSDMKNFFKEQRLKLLRRIVEQKNN

SEQ ID NO: 760 - DNA, 756 bp, Pelotomaculum thermopropionicum
ttgcatgcatacctgaaaatgagaatggatccgtcttcgccggccatacccattcattacaattatctaatccaggccgccatttatgccgtgctgccggaagaaatggccgcacgtcttcataatgagggttttgccgccggcaaacgcagctttaaaatgttttctttttcgaggctgatgggccggtttatcctggataaaacggcgggaacaattagttttcccgaagaaatatctttcgtgattacttccccggatatgggatttttcctggctctgatcaataatttgctcaccaggggtcaaattcaggtcgggcaatcgctgctgttgattgacgaaatccgttttgacgagcaggtggcggacggcgaggttttgaccgtgcgcaccctttccccggtggtggcctacagcaccctcctgcgtccggaaggcggcaagtacacctgttattaccagccgggagagggggagttcgacaaattgatcacagccaacctggccaaaaaatacgaggccttctaccgtagccggccgccggaaggaaacgtccgggcgcgccccctggaccggccccgcctgcacgtgactacgtacaagggcaccgtggtgaagggctacacctgccgcctgaagctcaacggtccccgggaactgctgcagatggccctggacgccggccttgggggcaaggggagccaggggtacgggtgcgtggagaaggtggtgggacggaaggggagccagtag

SEQ ID NO: 761 - protein, 251 aa, Pelotomaculum thermopropionicum
MHAYLKMRMDPSSPAIPIHYNYLIQAAIYAVLPEEMAARLHNEGFAAGKRSFKMFSFSRLMGRFILDKTAGTISFPEEISFVITSPDMGFFLALINNLLTRGQIQVGQSLLLIDEIRFDEQVADGEVLTVRTLSPVVAYSTLLRPEGGKYTCYYQPGEGEFDKLITANLAKKYEAFYRSRPPEGNVRARPLDRPRLHVTTYKGTVVKGYTCRLKLNGPRELLQMALDAGLGGKGSQGYGCVEKVVGRKGSQ

SEQ ID NO: 762 - DNA, 747 bp, Pelotomaculum thermopropionicum
ttgcaactcaccgttaccttccacgccccgtccgaggtggccgttccggtacactacggcgtcctgctgcagggtttgatctaccggcagatgcaaaaccctgccctgcgccgctacctgcacgagcatggctttcccctggaaaaacggcgctttaagctgttcactttttcccgcctgatgggcaggtcggcccgcttcgaccgggccggtggctcaatagtttttgtaccgcccctgcagctggtcatttgctctcccatttcctttatcctgcaggaactgggcaacggcttcctgcagcaggggcaggtccgccttggcgatgccaggctggaggtgaaggagatggccgcggccagcccccgggtgagctccagctccatccgggtgagaatgctttctccggtggtcatgtacagcacggccggagcggaaaacgggcgttcctatacttactactattcccccttcgagccgcgctttgcggaactcatcggtgccaacctggcaaaaaagcacctgctgattcacgggcgccgggcggaagcagacggcttcgatataaggccggcggaggtcagggaaaaagacttcaagataacccgctacaaggacaccatcgtcaaggggtggctgggcgagtactacttgaacggggacccggaactgctgcaggtggccctggatgccggcctgggggcaaaaaattcccagggctacggctgctgtgagctggtcatatag

SEQ ID NO: 763 - protein, 248 aa, Pelotomaculum thermopropionicum
MQLTVTFHAPSEVAVPVHYGVLLQGLIYRQMQNPALRRYLHEHGFPLEKRRFKLFTFSRLMGRSARFDRAGGSIVFVPPLQLVICSPISFILQELGNGFLQQGQVRLGDARLEVKEMAAASPRVSSSSIRVRMLSPVVMYSTAGAENGRSYTYYYSPFEPRFAELIGANLAKKHLLIHGRRAEADGFDIRPAEVREKDFKITRYKDTIVKGWLGEYYLNGDPELLQVALDAGLGAKNSQGYGCCELVI

SEQ ID NO: 764 - DNA, 981 bp, Pelotomaculum thermopropionicum
atgagcagcaggcggaactgtctcgttaacttgagcttaaaagaggcatctacaaccaatgcggggctctggctggacaaattcatccgcaatcaggccgaagacgataagaagagccgccgcttgctggtcgacgacgtggctggcataaaagagccggatgaatactcgctctggttcaaacgctgggagggaacgctgcttaattatggcgcacaatgccgggtggcggaagttttgggacgtatggctgtgggcctgggtgaggagagcgtcctggaaacatcggttgccctgcaccacacgtatggtgtgccttatataccgggcagcgccatcaaaggaatggccgccagttttgcccgtcaatacctgggagatgactggcaagtggataatcccgcgtataaaacggtttttggcgacacagacaatgccggctatatcatttttttcgacgcgctgcccttgccggggaccggtcattcgtatcctgacgtgatcactgtccatcacaaggattattacaaaaagggcaacctgccgccggctgactgggacagtcctaacccggttccgtttctttcggccacgggcaaatacctggtggcggtagcgggccctgctgcctggacaaacgcagtatttgaaattctgcaatatgcctttcttgagctgggggtaggagcaaaaacatccagcggttacggacggttaaagttgaaaccagctcctattgtcacggataaagatcaagagaaagctgatcaattaattggccagatcaaggcgttaaagaatccggaggttgccgggcggatccatgcattttacgagcagtggaaaagtattgagataaatgcggagcaaaagcgccgcatagcagaagctattatagccaaagtgaaagaggccggccgggaaaaacagtcaagagaaaagtcctggtataaagatttgctggcgagtcttgttgactga

SEQ ID NO: 765 - protein, 326 aa, Pelotomaculum thermopropionicum
MSSRRNCLVNLSLKEASTTNAGLWLDKFIRNQAEDDKKSRRLLVDDVAGIKEPDEYSLWFKRWEGTLLNYGAQCRVAEVLGRMAVGLGEESVLETSVALHHTYGVPYIPGSAIKGMAASFARQYLGDDWQVDNPAYKTVFGDTDNAGYIIFFDALPLPGTGHSYPDVITVHHKDYYKKGNLPPADWDSPNPVPFLSATGKYLVAVAGPAAWTNAVFEILQYAFLELGVGAKTSSGYGRLKLKPAPIVTDKDQEKADQLIGQIKALKNPEVAGRIHAFYEQWKSIEINAEQKRRIAEAIIAKVKEAGREKQSREKSWYKDLLASLVD

SEQ ID NO: 766 - DNA, 387 bp, Pelotomaculum thermopropionicum
gtgctgacccgcaaccaggagtatgccgccaggatttatcaacaggtgaaacaactggcagataaagaagacaaggacaagtgcaaaaagtacggctccatgtcgcacaggctgccggtgctcatccgcacggcgggactggcccaggcgcttgcgtttgtagaagccaggggtgatgccggcgggaaaaaactgcttgaagacattgcaattgttttagattttaaaggaaaagaagccttacttgagtccagccgtggggctgaactccctgaatacatgctcctgacacgcaaagttcttgccgccttgacctggtacaagcggtttgcccagtcggtgctgagtgtggagtcgggcgcggcggaggaggacggaaccaaatga

SEQ ID NO: 767 - protein, 128 aa, Pelotomaculum thermopropionicum
MLTRNQEYAARIYQQVKQLADKEDKDKCKKYGSMSHRLPVLIRTAGLAQALAFVEARGDAGGKKLLEDIAIVLDFKGKEALLESSRGAELPEYMLLTRKVLAALTWYKRFAQSVLSVESGAAEEDGTK

SEQ ID NO: 768 - DNA, 933 bp, Pelotomaculum thermopropionicum
atggaagcacgcatgcttttcttactagcgctttcccccctgcacgcgggaaccgggcagggcgccggggcgatcgatctcccggtggcccgcgaaaaggctacaggcctgccttatcttcccggctcttctctgaaaggagtgctgcgcgacgaatgcaagaacagcgagacacggaaaaaagtttttggtcctgacaaagacagcgcccacgaacatgccggctcggtccagttttcggaccagcggttgctcctgctgccagtccggagccttaagggaacgtttgcgtgggtcacctcgccttacattttgcgccgctgtcttcgggatgcagaaaatgttattggttttgataaaataccggaaatttctcttcccggttctataggcaactgccatgtaactaatgatgagtgcacgattacgctggatgatcagaaggtcatttttgaggacctggattttaccgccgtgccagatgaaaatgtgcgtgcgtgggctgaatggattggcaagcgaattttcccgggtgacactgactggcagaagatgctggccgcgcgtttttgtgtcgtgcatgacgatgtgatgggcttcctgcttgaaaccgcaactgaagtctttgcccgcataagattgcgcgaagatgccaaaacggtggaaaacaacgccctctggtatgaggaagccctgccggcagagacaattctttcagggctggttttcgcaaccacggtgaaggcaggaccgggggaagtatttaatacccttgaaggattaatgaaaaaaccgctgcagttgggcggcaaggcgacggtcgggcgcggcctgtgccgcctgcagatggcaggaggtggaattagctgtgctgacccgcaaccaggagtatgccgccaggatttatcaacaggtgaaacaactggcagataa

SEQ ID NO: 769 - protein, 310 aa, Pelotomaculum thermopropionicum
MEARMLFLLALSPLHAGTGQGAGAIDLPVAREKATGLPYLPGSSLKGVLRDECKNSETRKKVFGPDKDSAHEHAGSVQFSDQRLLLLPVRSLKGTFAWVTSPYILRRCLRDAENVIGFDKIPEISLPGSIGNCHVTNDECTITLDDQKVIFEDLDFTAVPDENVRAWAEWIGKRIFPGDTDWQKMLAARFCVVHDDVMGFLLETATEVFARIRLREDAKTVENNALWYEEALPAETILSGLVFATTVKAGPGEVFNTLEGLMKKPLQLGGKATVGRGLCRLQMAGGGISCADPQPGVCRQDLSTGETTGR

SEQ ID NO: 770 - DNA, 1335 bp, Pelotomaculum thermopropionicum
atgagagaactgccgaaggaattgccgcccccggtcaagccccggcttgaccgtcttaaaagaggcgatgaagagataaagatgataacccaggtacgctgttacgagttgattaccccattgtttggtggcggcgttaatcccggtgaggctgaccccattacagtggtccgcggtacggaaatccgggggcagctgcgtttttggtggcgcgcctgccggggcggccgcttcaacggcaacctggcggagatgagagaggcggaggacaaactctggggagcgaccagtacggagaagaaagcattgccgtcccaggttgatgtggtattgttaacatggcacgcaggcgagtctgaacaaccgtttgaggttgtagcggataaccgtacgggtcggccaaaacccagactcaaagcaaaagaatctgtggccttaccatatgcagcatttccattgcagccttcagaagaagaaatccgtgccggcggcatcggcatgaaaactaaaactgttcgtactaatgtaagctttactttgaaaattacttaccctgataaacagcagcaggaggtggaagctgcgctctgggcttgggaaactttcgggggtgttggcgcccgcacgcggcgcggctttggggccttgaagctggtaagcgtcgacgggaagccaataacccaaccaggagccgcccagattgaggccgaaattcgtcaggccctggaaaagcatgttatgagcgggatgtggcccgacggcgtaccgcatctttccctggagcctcaaatgaaaataacgggtagacacgcggagcccaaagctgcctgggattacttgatcaggcatctaaggaactttcgtcagagccgttcaggaggatccccacggcagtctgggcgcagccggtggcccgaaccggacgaaatcagaagacttacgggctgtcaatgcagcaggcacgccgtgccgctttctaatattggcaagttcccgcgggcggccttcgggttgccggttgtgtttcacttcaaggatagggatgcgggtgatccttgtgatactaaattaacgtgtggagaacaagactgcgatcgtctggctagccctctgattttaaggccgcttgcctgtagggatggcgcagtggggctggcaatggtcctggaggggacaggtgtgggtatggttccaggcggcctggttcttgagaaggaggaagggtccgaggaaagctggccagttgaggcaatgattgatgttaacgaggcgcaaaatattccgccgctcaatggtgaacgggatgtcttacaggcttttttaaagagaatctga

SEQ ID NO: 771 - protein, 444 aa, Pelotomaculum thermopropionicum
MRELPKELPPPVKPRLDRLKRGDEEIKMITQVRCYELITPLFGGGVNPGEADPITVVRGTEIRGQLRFWWRACRGGRFNGNLAEMREAEDKLWGATSTEKKALPSQVDVVLLTWHAGESEQPFEVVADNRTGRPKPRLKAKESVALPYAAFPLQPSEEEIRAGGIGMKTKTVRTNVSFTLKITYPDKQQQEVEAALWAWETFGGVGARTRRGFGALKLVSVDGKPITQPGAAQIEAEIRQALEKHVMSGMWPDGVPHLSLEPQMKITGRHAEPKAAWDYLIRHLRNFRQSRSGGSPRQSGRSRWPEPDEIRRLTGCQCSRHAVPLSNIGKFPRAAFGLPVVFHFKDRDAGDPCDTKLTCGEQDCDRLASPLILRPLACRDGAVGLAMVLEGTGVGMVPGGLVLEKEEGSEESWPVEAMIDVNEAQNIPPLNGERDVLQAFLKRI

SEQ ID NO: 772 - DNA, 1191 bp, Pelotomaculum thermopropionicum
atgaaggtatgggtcattgaaccccgtgatccccttattgcccgcgacgggcgcccgtttgggcctgtgcccggcgcccgggcctttaccctggcttttccgtttccatcgaccattgccggggctgtccgcacacgggacggactcgatgcctcgggtcgctttcagccagctgaaattccccgtttgaaaaagatagaggtcctggggccgctgctggtggaattggatgccggaacaggggacattgacaggtggctggttccggcgcccgctgacgcgcttttttttgaacttgtgccgtctgattttaccaaagcggcaatcaggcaactcactccactacaattgccgccgggatcacacacaaacctgccggaagattctttggcgcctgttggaatgcccgatcgggacccccgtaaaccgttcagtaaaacaccagcctattggtattggaaattatttgaaaaatggcttgtggatccctttgatggtgatgttcaacttgttgaagtgggtcataacggccccgtccaggaggtgcggatgcacgcgagcatacggccggatacgcagacggcagatgaagagaaaggggctctcttccaaacgcggggtctggagtttgcttgtccggtggaggaccatgccgatggcggtatactttccagggtgcgccgcttggggctggcggcggccgcggatgctcccaaccttaagccggggatcgctcctttgggcggcgagcgccgcctggccttctggcggcaaagcaaccaggtgcttccctcctgtccggaagccttaaaagaaaaaatagccgccctgggacactgccgcctgatattgcttacaccggcgcatttcggggcaggctggaaaccatcccggcttcttgaagaatgggagggtgtgcggccttatttgcaggcggcggccctcaagaggcaccagactgtctcaggctgggatttagagggaaaaggtagacgcaaacccacccgccgcttggcgccggctggcaccgtatatttcctgaaacttaacggtgacagcgcagcgatcaaaagatgggtagacagcatttggctgacctgcgtaagcgacggggagcaggatcgccgcgacgggtttggcctggctgttaccggagtatgggatggtaatctacaccggatggaggtgtga

SEQ ID NO: 773 - protein, 396 aa, Pelotomaculum thermopropionicum
MKVWVIEPRDPLIARDGRPFGPVPGARAFTLAFPFPSTIAGAVRTRDGLDASGRFQPAEIPRLKKIEVLGPLLVELDAGTGDIDRWLVPAPADALFFELVPSDFTKAAIRQLTPLQLPPGSHTNLPEDSLAPVGMPDRDPRKPFSKTPAYWYWKLFEKWLVDPFDGDVQLVEVGHNGPVQEVRMHASIRPDTQTADEEKGALFQTRGLEFACPVEDHADGGILSRVRRLGLAAAADAPNLKPGIAPLGGERRLAFWRQSNQVLPSCPEALKEKIAALGHCRLILLTPAHFGAGWKPSRLLEEWEGVRPYLQAAALKRHQTVSGWDLEGKGRRKPTRRLAPAGTVYFLKLNGDSAAIKRWVDSIWLTCVSDGEQDRRDGFGLAVTGVWDGNLHRMEV

SEQ ID NO: 774 - DNA, 1809 bp, Pelotomaculum thermopropionicum
atgaatgggacacacctggtcacttttcacatcggcccggtgcaggatttcattgccacagcgcggcgcagtcacgatctgtggtacggctcttggctgttgagtgaactggcaaaaacggccgcattggaagttgtccggtataacgggggtgattcatcatgccttatatttccggcttctgaaggggacagcctggagcagttgaagtcatttgattttagcgcgcctaataaggtggttgccgtggtcagctgcaatcctgttgagttaggtgatgccgtcaaagaatctattaacaggcgcttggatgaattgtccaatgatgtgttcaggggaatcaatggctttgaacgtgaagtggccgtacagcaggtgaaagactttattgagttcttttgggcttcgtatcctttaaatggtaattacaaacaggcgcgcgattttgctgaagccgtcctcagcgcccggaaggcaacgcgcgattttgcccaggtaagttggggttcgagcgagcccaaatgttcccttgacgggtgccgggagtcggttattgctgaaaccatttacaaacagatgaacgatgacaagctttataagagttaccgcgtgcagcgcggcgagtatttgtgcggggtatgcctgctaaagcgtcacggcaaacggggaagggaggagtattttttcagcacttcccacgttgcagcacttccattgctggaacggcttaccggacagcaccggccgcttgtggaagagtatgtcggcaaattgaaagaactcggcattccgccgggtgatctggagacggtacggccaccccaccccgtgtttggtcctaacgacggccatttattgtacgaagagcggttccgcgagtttttcttccaggagaaggaaaagatacagatagcccaaaaagcgctgcgtgagtttctgaaaaaagccttcggcgataaaaaaccgctgccttactacgcgcttctatgcgctgacggcgatcacatgggcaaggtaatcgacgcccagaaaactcccgaaaaacaccgggagctctcacggagccagagcagctttgccctggaagcgcgccggatagtgaaagagaacaatggatcccttatatattccggcggcgacgacgtcctggctttagtacctttgcacaaagtgctcgactgtgcctgtaggttatccaaaacattccgggagcggcttgccgggtttaagggagaggacggcggggaggaaatatcaccgacactttcggttggcattgctgttgctcatcatctcgaacctctctccgacgtccttgagctggcgcgcagtgcggagaaggcggccaaatccgtgcccggcaaaaacgccctggcggtgacattgagcaagcggagcggttcagagaggatggttaaaggcacctggggggacctggatcggcagttaaaatggcttattaacttacatcgcaatgaagacgttcctgacggtgccgcttatgagttgtacgatctggccaggcggcttgaaacacgaaatgaagagttaaagggtacgcttcaagaagcagcttgcgcggaagccaaacgtattctacgccgcaaaaaagcccggcgcggtactgaacgcatggcggaggaagtgttggcggggttggagtccttacttgagagcgacaagttttcctttgaaaaactcaagcaactggcggatggcctcattattgccagggagttcgccgttgccatggaactggcaggagcgccccagttcccagtctcaaccggcgaggtggtgaaaaaatga

SEQ ID NO: 775 - protein, 602 aa, Pelotomaculum thermopropionicum
MNGTHLVTFHIGPVQDFIATARRSHDLWYGSWLLSELAKTAALEVVRYNGGDSSCLIFPASEGDSLEQLKSFDFSAPNKVVAVVSCNPVELGDAVKESINRRLDELSNDVFRGINGFEREVAVQQVKDFIEFFWASYPLNGNYKQARDFAEAVLSARKATRDFAQVSWGSSEPKCSLDGCRESVIAETIYKQMNDDKLYKSYRVQRGEYLCGVCLLKRHGKRGREEYFFSTSHVAALPLLERLTGQHRPLVEEYVGKLKELGIPPGDLETVRPPHPVFGPNDGHLLYEERFREFFFQEKEKIQIAQKALREFLKKAFGDKKPLPYYALLCADGDHMGKVIDAQKTPEKHRELSRSQSSFALEARRIVKENNGSLIYSGGDDVLALVPLHKVLDCACRLSKTFRERLAGFKGEDGGEEISPTLSVGIAVAHHLEPLSDVLELARSAEKAAKSVPGKNALAVTLSKRSGSERMVKGTWGDLDRQLKWLINLHRNEDVPDGAAYELYDLARRLETRNEELKGTLQEAACAEAKRILRRKKARRGTERMAEEVLAGLESLLESDKFSFEKLKQLADGLIIAREFAVAMELAGAPQFPVSTGEVVKK

SEQ ID NO: 776 - DNA, 24 bp, Pyrobaculum arsenaticum
gaatctcaaaaagaggattgaaag

SEQ ID NO: 777 - DNA, 693 bp, Pyrobaculum arsenaticum
atgatcgactgcctagcccccggacataacgtcgcctcctgcgtggtgcgggagctggtagagcggagcaagagggggcctgtggagctcccccacttcagcagggaggtggcgctggggctgaggggcttcaaggtagatgtcgggctggtggagcgctacctcaaagagctccaggcggcaatgcgcgctctgtacccccatgtctaccgcatcgacttagagctccagacgccgctggtggtccacgtgagaaatccctacatgccgctggaaatcgggattgcgtggcacccctacttcaacgcgccctatatcccggccacttccataaagggcgccctcagagccggggcgggcggggcgctctgcgggagggcgccggcagagctcttcggcgaggtgggggccgcgggcgaggccgccgtgaccgacgcctttcccaccacccccgacgtattgtcggcggacgtcatcacgccgcactataaggagccggacttccgcgagaccaaagcgagcccgacgccgctggtattccccgtggcccggcccggcgccaccttcgccttcctcatcggcctggagttcccgtgcgacttcgcggaggtccaccgctacgtcggcgatgcgctgagggagggcctcggggctaagacaagagtaggttatggaataattaaattgaagtaa

SEQ ID NO: 778 - protein, 230 aa, Pyrobaculum arsenaticum
MIDCLAPGHNVASCVVRELVERSKRGPVELPHFSREVALGLRGFKVDVGLVERYLKELQAAMRALYPHVYRIDLELQTPLVVHVRNPYMPLEIGIAWHPYFNAPYIPATSIKGALRAGAGGALCGRAPAELFGEVGAAGEAAVTDAFPTTPDVLSADVITPHYKEPDFRETKASPTPLVFPVARPGATFAFLIGLEFPCDFAEVHRYVGDALREGLGAKTRVGYGIIKLK

SEQ ID NO: 779 - DNA, 1068 bp, Pyrobaculum arsenaticum
atgaaggcggagttcgaagtaaccatcgccacgccgctgtccgtcggcagcttcgaccccaacctcgtggaccgccacttctacatacggcccacgtcggtgaaggggatatggcggtggtgggccagggccttcgccctgggcgcgctcttcgaggccgggtgccccgacatgaaggcggcggccggcttggtggctaagtggggcttcggcacgaccggcgcggcctcggcgtataggataacggtggaggttagggagcccccccaggtgaagaccgtgaggaggaggcaacgctccggcatccagcgcttagacctagtggcgcttagcagagacgtggagtacgccgttgggggccgcttcgtgcttaggatcgagggcggggggcggtacttcgaccacgccctgcgcatcctcgcagttgcgctgaccctctcgggggtggggaagggctctaggaagtcccttggggtcctggacgtgacagcggcgaggggcgacgcccccagggagcgtagcgtgagggatctcatagaggccgttaagcgggaggcgggccgggatgcggcgtgcaccggcaaggcgcagaggggggagctcccgccggcgcccgccattgcgagggacgccttcgaggtgtactccgcgcgggcgggcttccaggaggttcacggcttcttcctccgccccaacagagcccgcgcggcctccggctcctattccgccccggaccccatggaccacatggcgtggttcttcggcctcccgaggagccagaagggtaccggctacatgtcgcccggggagggcaggggctcggagagggggaaggagctgaggagggcctccgccgtcttcgccgcggcccacggcgataggcacgtctacggccgggggacctacatctcgatattcctctcgctggactggcccgagcaacttaaatgggtcggcgggtcggggacgcgcaccataaggatcgacgccgcggccgttaggaaggcgcgggacctcttcctccagctcgtccagagccgctggggcctccagagggtgtggccatga

SEQ ID NO: 780 - protein, 355 aa, Pyrobaculum arsenaticum
MKAEFEVTIATPLSVGSFDPNLVDRHFYIRPTSVKGIWRWWARAFALGALFEAGCPDMKAAAGLVAKWGFGTTGAASAYRITVEVREPPQVKTVRRRQRSGIQRLDLVALSRDVEYAVGGRFVLRIEGGGRYFDHALRILAVALTLSGVGKGSRKSLGVLDVTAARGDAPRERSVRDLIEAVKREAGRDAACTGKAQRGELPPAPAIARDAFEVYSARAGFQEVHGFFLRPNRARAASGSYSAPDPMDHMAWFFGLPRSQKGTGYMSPGEGRGSERGKELRRASAVFAAAHGDRHVYGRGTYISIFLSLDWPEQLKWVGGSGTRTIRIDAAAVRKARDLFLQLVQSRWGLQRVWP

SEQ ID NO: 781 - DNA, 426 bp, Pyrobaculum arsenaticum
atgacctggctggaggaggcgctgggctgcataaagctaatagactccctctgcggcagtgaggcgaagtcggccttcaggacgagggcgaggcagatcccctctgatatatactacatcggcacggcatacgccttcgcggttctggccgccaggtctggcgagaaggccatatacgcccccggcgacttggcaaacaagataggtgcaatatgtaggggggacttgggcaaagaggagaagggctacgccctctacggggcgtgcctcctggaggctctgaagaagctgggcatacccacgggcaacctcgtggacactttgaaagccctagacgagaggggggctgtggtagacatggagatagcggagtacgtcgactggcttaaaaaactggcagaagccaagttcgaaaaggaggaatga

SEQ ID NO: 782 - protein, 141 aa, Pyrobaculum arsenaticum
MTWLEEALGCIKLIDSLCGSEAKSAFRTRARQIPSDIYYIGTAYAFAVLAARSGEKAIYAPGDLANKIGAICRGDLGKEEKGYALYGACLLEALKKLGIPTGNLVDTLKALDERGAVVDMEIAEYVDWLKKLAEAKFEKEE

SEQ ID NO: 783 - DNA, 927 bp, Pyrobaculum arsenaticum
atgccaggtaggttgttttgggtcctggccttgacttcgatccacccaggagttggacgctcggaggcggcccatgtggatctccccgtccagagggacgagttcggcctccccgccatatgggcgacgagcttgaagggggctgttagggctaaggcggaggggggcctattcgcggggccttactgtgtcgacgtggggaagaaggatgagtgcgccaaggtgattgcggcttttggccccaagcctgaatacgcatcggagcactcctcggccgttgctttcttagacgccaagctcttcgcggtgcccgcccggtctttgaggggggtgtggatctacgtgacgtcccccctcctcctcggctttgcgaagctctactcgcaggcccttggggtgccgctgagcctcccccagctgcccacggttggggagggggaggtggcgctgtccagcgggaggttcgccgagaacaacgtggcggtgataaacgagatgaagttcaaggtggttggggaacaggcgccggcgctgaatttgcccccctttgacaaggtcaagcaaataactggttccgagcccggcttcgccgttgtcagcgaccaggacctgcccagggtcgtgaggaggagcctcttggtccagtaccgcgtgaggcttaagaaggaaacaaagacggttgagacggggccgtggagcgaggagtacatcccgcctttcacggtgtttatcaccggcatccactgcaacggccgggttagggaggcggtgagggttaggctacccccgaaggatgacaagaaaaacgaggaggtggtggagctgaagaatttcgacccatgcgcctatgttgagtccaaggctaaggggccgctgtggataggcgggaaggagaccgtgggcaaggggctagtggagatcctatga

SEQ ID NO: 784 - protein, 308 aa, Pyrobaculum arsenaticum
MPGRLFWVLALTSIHPGVGRSEAAHVDLPVQRDEFGLPAIWATSLKGAVRAKAEGGLFAGPYCVDVGKKDECAKVIAAFGPKPEYASEHSSAVAFLDAKLFAVPARSLRGVWIYVTSPLLLGFAKLYSQALGVPLSLPQLPTVGEGEVALSSGRFAENNVAVINEMKFKVVGEQAPALNLPPFDKVKQITGSEPGFAVVSDQDLPRVVRRSLLVQYRVRLKKETKTVETGPWSEEYIPPFTVFITGIHCNGRVREAVRVRLPPKDDKKNEEVVELKNFDPCAYVESKAKGPLWIGGKETVGKGLVEIL

SEQ ID NO: 785 - DNA, 2637 bp, Pyrobaculum arsenaticum
atgggttggtttgacaaggcgtgggccctgctccacgacccgccctacaaggccctctggccactgggctacaagccgctgggagggaagacccacgaggaggaggccaagcgcttgatggcggctctcctgggcggcaccaagctcggcggcggggcgccggacgagaggacgtctaggatagtcgccgccgctgacaggcttgcctcttccttcgaccgctgggccctctccacggagggcgaggcgaagtactgggtcaagccggcggagctggtcaaccccttcaacccggcgtacgcggcaagagtagagccgccgcccccggagcagttcgggggacggatagaaagcttcgtaaaaaacgtaaaccgagtagttagggaggccggcgatgagaaagaggcctacttcgccctgtacgcggtgtacgagcttgcgtggatcgaggccggcctgccggccctgccagcagacacgagggtccccacccacaccatattcgaccacctatacgccaccgcatctgtgatgaactgggtcggcgacggcggcgagccgaggggggacgcctgccttcttgaaatcgacatcccaggcatccagaaggtgatctcctcagcgaggaaggccggggactaccgcgccggcagcatgttggtctccctggctatttggggcacggcgtggaggtacatggacaaacacggccccgacgtgttgctctccccatccccccgcttcaaccccttcctgtacctccagctgaggcgcctctacggctggggggagtcggcgcttcggctgtacagaaaggtggcgggcatggcactcggggcggacgtcgcggcgctgttggacaaaacgcccctggtcccaggcacggcgtatttagccctccccagctgctccgacgcggagagggcagtggagcacttcgaggacgcgctcgacgagataagggccatggtcctgggggagagggaggcgaagctccccctagcgggctcaacgactggcgacgtcttgaaaatagccaaggcggccttggaggttgcgccaaggaggtacctcccagtgagggtgcgctacgcctctatctcagaggcgtggggcgcggcggaggaggccgcccgggaggtcagcagggaggcggggttcgaggtggaccccgccaggttcatcttctgggccttgatgaaagtcttgaaagaaaagccggcggtgccccacccagtggcctggttcgacaagggcggcgcccccaggtttgttaagaggtacggagggccgtggatctacagtagcctagacccagaccagccagcggtcctgaagctctcgggcgttgtaaccccccaaggggttgactacgacgaggaggccaaggccgccttggcccagatcggggtgcagaacctcgccgagttggccaaggtctttaggccaaaggaggccctcggcccagtagacgtgctcaagcgggctctgtactacggggtgtccagggatagggtggagtcggtggaggcggtggcccttaggtggcactaccgccgtgggtatttcaaaaactgcccagacctgcagcggagggtggaggaggtcttgcaaggcgccgacgccgaggcggtcttcacgtcgccggaagccgccgacaagaccctggcccaggccccccagctctgcggaggcgacccggccatccccgcccccaccctcatgtacgccatcatcagggcagacggagacaacatcggcaagctgatatccggctgcctaccccccgcacagcggccccccgtcgaggatcggcttgtagaaggcgacaaaggccagtgggaggaggaccagaggcggctggaaaagctagaaaaggcggtccaggtcctgggggagaaggccaagtgccggggcgccggcggcggggctgaggcgaggtacgcggtgccgtcgcctgcctactacgccgccctctccgcctctatgatgataacggcgctgaaagacgcgtacatcgtggccaagcacgacggcgaggtggtcttcgccggcggcgacgacttgctggccttcgccccccttgccgcggccttccacatcgtgaaggagagcagagaggcctactggggagaaggcggcttccacaaaataggcccctactccctcccagccctcgcggcctatggaaaaagctactcggtaagagccgcccactccattacggacttcatggccatagaggtggaggaggcgacccgactactggaaaaggccaaggaggcggtcagaggcaaagacgcgctggccatctccacctccaccggccacgcggggttcgccaaggcgcgccacgcggcgcttgtggagcagatagcggaggcctacaggacgggcaacctcagcaaaaacctcccctacgacctcgagaggtgggccggcgacgggctgaggtgcggaggcggcgagacgtgcagagaggcggccagcataatcctcacctacgtggccagccgcaactccaaaaacggcatcccaagccgcttggaggagctactcgacgccgtggccgacggggcggatgcggcattgaaaaacgccgcggagctcctaaaagcggcgagggagtgggcatga

SEQ ID NO: 786 - protein, 878 aa, Pyrobaculum arsenaticum
MGWFDKAWALLHDPPYKALWPLGYKPLGGKTHEEEAKRLMAALLGGTKLGGGAPDERTSRIVAAADRLASSFDRWALSTEGEAKYWVKPAELVNPFNPAYAARVEPPPPEQFGGRIESFVKNVNRVVREAGDEKEAYFALYAVYELAWIEAGLPALPADTRVPTHTIFDHLYATASVMNWVGDGGEPRGDACLLEIDIPGIQKVISSARKAGDYRAGSMLVSLAIWGTAWRYMDKHGPDVLLSPSPRFNPFLYLQLRRLYGWGESALRLYRKVAGMALGADVAALLDKTPLVPGTAYLALPSCSDAERAVEHFEDALDEIRAMVLGEREAKLPLAGSTTGDVLKIAKAALEVAPRRYLPVRVRYASISEAWGAAEEAAREVSREAGFEVDPARFIFWALMKVLKEKPAVPHPVAWFDKGGAPRFVKRYGGPWIYSSLDPDQPAVLKLSGVVTPQGVDYDEEAKAALAQIGVQNLAELAKVFRPKEALGPVDVLKRALYYGVSRDRVESVEAVALRWHYRRGYFKNCPDLQRRVEEVLQGADAEAVFTSPEAADKTLAQAPQLCGGDPAIPAPTLMYAIIRADGDNIGKLISGCLPPAQRPPVEDRLVEGDKGQWEEDQRRLEKLEKAVQVLGEKAKCRGAGGGAEARYAVPSPAYYAALSASMMITALKDAYIVAKHDGEVVFAGGDDLLAFAPLAAAFHIVKESREAYWGEGGFHKIGPYSLPALAAYGKSYSVRAAHSITDFMAIEVEEATRLLEKAKEAVRGKDALAISTSTGHAGFAKARHAALVEQIAEAYRTGNLSKNLPYDLERWAGDGLRCGGGETCREAASIILTYVASRNSKNGIPSRLEELLDAVADGADAALKNAAELLKAAREWA

SEQ ID NO: 787 - DNA, 816 bp, Pyrobaculum arsenaticum
atgaaggtggtcataaagcccctgggctacgcccgcatcgccgcgaggcccccctccacgccctcaatagcggcgagggacgaggcaaccgccgcgccgcccccctccacagtgctgggcatgctgggcgcgctgaagggcatcgtcgcccagtgccccggcccaggcccccaaggcgccgagagacaactggtggagctggcacaagctctcggcgtcagaagcgtctgggggcccctggtggagatagacggcgtcctccacgcccccggcctagactccctatacgccgtcaaagggggtagggtcgagaggagggccatatccaccatccgcagagtggggctagccctaagcgccttcaagacagcggcgccgggcttcctgtacaccgccacctacgtcgcggagaaggcgaagtacatctactacatcgacgccgacggcttgagggggggagtggcgagactaggcggcgaggggagactggccctagtcgaggtggaggagggcgaagccgacatcccagaggagatcaccggcagagccatcctcctaacaccactcctaatcccagaggggaggccgccccagtgcctaaggccgttgggggtgttcgaggagcggggaggggcggttgagatagcccccaaggtcagggtagtccagtggggcctaggcttctcggaggtgtgcagggaaaggaggccgatgtaccccgcaatcgccccgggcaccgtggtggaggccacccgctgcggcagaaacgtcggctacctcgcagagctgggatacggcgcgttgatgcctctatga

SEQ ID NO: 788 - protein, 271 aa, Pyrobaculum arsenaticum
MKVVIKPLGYARIAARPPSTPSIAARDEATAAPPPSTVLGMLGALKGIVAQCPGPGPQGAERQLVELAQALGVRSVWGPLVEIDGVLHAPGLDSLYAVKGGRVERRAISTIRRVGLALSAFKTAAPGFLYTATYVAEKAKYIYYIDADGLRGGVARLGGEGRLALVEVEEGEADIPEEITGRAILLTPLLIPEGRPPQCLRPLGVFEERGGAVEIAPKVRVVQWGLGFSEVCRERRPMYPAIAPGTVVEATRCGRNVGYLAELGYGALMPL

SEQ ID NO: 789 - DNA, 1176 bp, Pyrobaculum arsenaticum
atgaggcggctctacgttgccacctggggcaaccccctggagtggcgggaagtggactaccaatgcgacgggaggggggtgaggaggggcttcgcctccgccgtctgcgcagaggccgacaaatacgtcgtacacgtcctcgacagcgtagtcacggcatcgggaggaggccaggggaggcccctaaacccacacgccgtggaggccgcaaagaaggcggggctcaaagtcgtggagaaagacggggcggtccacgtggagccgccccagtgcgagaaatggagggaatacgccaggcgctacgtagaggagctactcaggaggataggcatagaggggacagtcgtagtcacagccgccgtcgggaggctgagcaacaagacgtacagaggcacccccgacctaatactctcagagctcatatggggcctgtggcaagcggtgaaggagctcggcgagcccaagggccagctggacatacacctagacgtcacacacgggataaacttcatgccaaccgccgccctctgggccgccaggctggtcgcctccatagccctcgcggcggggtacgacaaagtcgtcctcaaggcgtacaactccacccccaaccagtggcactacgtggaggtgttcaccgaggaggtcacacacatacagttcccccgcccgccccgctcccccgccgccaaggccctgtactacggagcccccatacactacgcccacctatgcaaggaggagcaatgccacgagccccccacagcggagcccacgtgcgtagacaacgaggtccactacccccagcccaggacaacccccctccagctctacgaaatactcctaacacaagccggctgcccgcagagcatccccaccctgaagcaactaaaggactggcacctagtaaaggtgctaccccccacagccagcatggtagtccgtcacgagctaagcgccatacagaaagccctcggaaggagaaaaatcggaaaatgcacaaagctcatagaaatactcccctacgccgccggcgaccccaacccatgtcaagacgacaacagaaacttcgtcgcccacgccggcttgctggcagatcacaccgagctgtgcccccacggcgacgactaccaaataaaaatagaagaagccacaatgaagtgtctacaaaaatag

SEQ ID NO: 790 - protein, 391 aa, Pyrobaculum arsenaticum
MRRLYVATWGNPLEWREVDYQCDGRGVRRGFASAVCAEADKYVVHVLDSVVTASGGGQGRPLNPHAVEAAKKAGLKVVEKDGAVHVEPPQCEKWREYARRYVEELLRRIGIEGTVVVTAAVGRLSNKTYRGTPDLILSELIWGLWQAVKELGEPKGQLDIHLDVTHGINFMPTAALWAARLVASIALAAGYDKVVLKAYNSTPNQWHYVEVFTEEVTHIQFPRPPRSPAAKALYYGAPIHYAHLCKEEQCHEPPTAEPTCVDNEVHYPQPRTTPLQLYEILLTQAGCPQSIPTLKQLKDWHLVKVLPPTASMVVRHELSAIQKALGRRKIGKCTKLIEILPYAAGDPNPCQDDNRNFVAHAGLLADHTELCPHGDDYQIKIEEATMKCLQK

SEQ ID NO: 791 - DNA, 573 bp, Pyrobaculum arsenaticum
atgtcgagctgtattagccccgcgctgattaggcagtacctctactgcccagccgccgcgtactacacagccacgggacaggccgagccccccaccgagaggatgcggaagggaaaagaggcgcagagagaggctgtggaagccgtggccaaggccctaggcgccgagcaggtggtgcacgccccgcggctaagcggcgccggtatctgcggcgttgtagacgccctcctcttcatacggggaaggcccgcccccctcgaggtgaagctgtccaagcccggcagggcggtgcccctccaccacaaagcccaagccgccgcctacgccctagccgcccaggcccagtacggcaaggcctcacccggcgcgtacatctactacgccgagacgggcgaggtaaaggccatccccctgacacgcgacctcgccgaactggtgaagcacaccgccgcccagatacgccgcatgatggccggctggaccccagacccccgctaccacccagccaaatgccccagctgctggtaccgcaaaatctgcggcttcacccagaccaaagtcgaaaaaatctaa

SEQ ID NO: 792 - protein, 190 aa, Pyrobaculum arsenaticum
MSSCISPALIRQYLYCPAAAYYTATGQAEPPTERMRKGKEAQREAVEAVAKALGAEQVVHAPRLSGAGICGVVDALLFIRGRPAPLEVKLSKPGRAVPLHHKAQAAAYALAAQAQYGKASPGAYIYYAETGEVKAIPLTRDLAELVKHTAAQIRRMMAGWTPDPRYHPAKCPSCWYRKICGFTQTKVEKI

SEQ ID NO: 793 - DNA, 276 bp, Pyrobaculum arsenaticum
atgtacctagtggtcgcctacgacgtgtcggaggacgacgtgaggaacaaaattgcggaggtgctcaaggcctttgggctccagcggatacagcgctcggtcttcgtggggaggctacccccagccctggtcaaggagctggcggagaaggtggccagagtcgccaggtgcgccaacgcccaggtggtgatattcaaggtggacaagagggcagtcgaaaccgccataagaatccccccggcaccggccaagaggggcaatgtcgagctgtattag

SEQ ID NO: 794 - protein, 91 aa, Pyrobaculum arsenaticum
MYLVVAYDVSEDDVRNKIAEVLKAFGLQRIQRSVFVGRLPPALVKELAEKVARVARCANAQVVIFKVDKRAVETAIRIPPAPAKRGNVELY

SEQ ID NO: 795 - DNA, 885 bp, Pyrobaculum arsenaticum
atgcaggtggcggtcgctagctacggggccagaataagggcgaggagggggctactggtcgtggaggggagggaggggaggcgggagtaccccctccaccaggttgacgaggtcctgctcctcaccggcggcatctccatctcggcgagggcgttgaggatgttgctgagggccggggccacggtggttgtcatggacgcaaggggggagcccctaggcgtcttcatgaagcccgtgggcgacgccacgggggccaagaggctgtgccagtaccaagccgccgtcagcggcagggggctggaaatcgcgaaggggtggatctggaggaaaatacggggccagctggaaaacgtcaagcggtggaggcgccgcctcgccaagtacagggaatacgccgagaggatctccgccgcggccgacgccctcagacacgccgcggagccccacgacgtcctcgaggccgaggcggccgccgcggaggcctactggtccgcatatagggaggtgacgggcttcccgggccgcgaccaggagggcggcgacccggtgaacgccgcccttaactacggctacggcgttttgaaggctctctgcttcaagtctctgctaatagccggcctcgacccctacgtcggcttcctccacgccgagaagtccggccggccgtcgcttgtgctcgacttcatggagcagtggaggccgagggtagacgccgtggtggccaagatatacgacgggcttgaaaccgagggcggactactcacccaccagtcgaggctgagggtcgccgccgcggtgctggaggagctcggcgccgccggcaagccgctgtcagcagaaatacacagagaggccagggccttggccaggtccatatgtacctag

SEQ ID NO: 796 - protein, 294 aa, Pyrobaculum arsenaticum
MQVAVASYGARIRARRGLLVVEGREGRREYPLHQVDEVLLLTGGISISARALRMLLRAGATVVVMDARGEPLGVFMKPVGDATGAKRLCQYQAAVSGRGLEIAKGWIWRKIRGQLENVKRWRRRLAKYREYAERISAAADALRHAAEPHDVLEAEAAAAEAYWSAYREVTGFPGRDQEGGDPVNAALNYGYGVLKALCFKSLLIAGLDPYVGFLHAEKSGRPSLVLDFMEQWRPRVDAVVAKIYDGLETEGGLLTHQSRLRVAAAVLEELGAAGKPLSAEIHREARALARSICT

SEQ ID NO: 797 - DNA, 849 bp, Pyrobaculum arsenaticum
gtgctaactctcgcggagctgtccaaggcgcttaggagggcgaagaccacctgggggccggtggaggtgtcgccagagctgaggggctggagctacgacaagccgcccgttaagccgccggcctaccccggcctcgccttatccgacttcgcatacggctactgccccacctacagaaacatctacctcaaatacgtcctcggcgagagggggggccccagcaagaccttgcaggaggggcaagtcctccactccgtgctgttcaaggcgcttgaggacttttgccgctacgcatatgcgggggtccccatgtcgccggggctggagggggtgcccgaagatctgagggacaaggccgaggccctctacaaatacgtggcggcccggctgataggcgagtacagctacgcccttgcggcgaggctcgccaggagcagagacgccgcggtgttctacgcatcgcccatcgccacccaagtggccgtggacggcgcccccctgggcttaggctacgtggtggccgacggcttggcgctgggcgcagtggtggagttcaagttcggccccgcgccgaacgtggaggccgccctcgcggggtacgccatggccatcgaggccgactggggcgtccccgtggactacggcatacacgtccagatctctgtaaaccacgccgtggagtacagagtcacggcctaccccctcggcgactcggcccggtccaagttcctggaggcgagggacgaggccgtggacgtcgccgcctctggccgcgaccccggagcccctccccagtgccccaagacgtgccccttctacgcggcgtgccatgcaggtggcggtcgctag

SEQ ID NO: 798 - protein, 282 aa, Pyrobaculum arsenaticum
MLTLAELSKALRRAKTTWGPVEVSPELRGWSYDKPPVKPPAYPGLALSDFAYGYCPTYRNIYLKYVLGERGGPSKTLQEGQVLHSVLFKALEDFCRYAYAGVPMSPGLEGVPEDLRDKAEALYKYVAARLIGEYSYALAARLARSRDAAVFYASPIATQVAVDGAPLGLGYVVADGLALGAVVEFKFGPAPNVEAALAGYAMAIEADWGVPVDYGIHVQISVNHAVEYRVTAYPLGDSARSKFLEARDEAVDVAASGRDPGAPPQCPKTCPFYAACHAGGGR

SEQ ID NO: 799 - DNA, 621 bp, Pyrobaculum arsenaticum
gtgaagctggcagtgacggtgggcttcgacgcgcggcttgtggtgagggccttggccaacatccctggccgcgacgtcgtcctcgtgcgcggcgccacgggcggcgagggggacgccaagtcgagggaggctgccgccgagataattaaggccttggggagaggcgcagagtacgtggtggacatccgcgatcccgccgtgggcctccgccagctctacgacctgcagttcgacgagatcgccctggcgggagggccccgcctgctggtggtgctgggcttcgtcgcggcggcggttaagggggcgaagatatacgtggtgccggagtacggtagcgaggtggtggatgtcagcgggctggcggctctggggaggttggcggctctttccagcgcgaagcttgctgtgttggcctccatcgacggcgaggctgatgcggagactgtggctcgccgcctggggcttgacccctccaccgtgtaccgccaccttgactccctagaggagataggcgttgtgaggtctaaggggaggagagggaagaagtacgaggtggataagctcgtggctacactgtcctctctatttttggagaagaagaggggcagtgcagttttgtga

SEQ ID NO: 800 - protein, 206 aa, Pyrobaculum arsenaticum
MKLAVTVGFDARLVVRALANIPGRDVVLVRGATGGEGDAKSREAAAEIIKALGRGAEYVVDIRDPAVGLRQLYDLQFDEIALAGGPRLLVVLGFVAAAVKGAKIYVVPEYGSEVVDVSGLAALGRLAALSSAKLAVLASIDGEADAETVARRLGLDPSTVYRHLDSLEEIGVVRSKGRRGKKYEVDKLVATLSSLFLEKKRGSAVL

SEQ ID NO: 801 - DNA, 336 bp, Pyrobaculum arsenaticum
atggctagtaaagagataaacctagatccagtaatagaagtattatcaaagctggcgcgggataaggtatatggacctcttgacatgctgagccgtgtggaagacaaggatgagttctacatgaagatggctagggaggcgctgtactcggcggtgaggtactacgccactgaggggggccatgtgccggagctggaagacgccgtggagaccgcgcttagactcatcgaagcgagacctcacgtcgctaaggagctcgcgttaaaggcgctggctagggcgatgagcgctgagaagagcgccgccggtaaaggcgaagagaagaaggcggggtga

SEQ ID NO: 802 - protein, 111 aa, Pyrobaculum arsenaticum
MASKEINLDPVIEVLSKLARDKVYGPLDMLSRVEDKDEFYMKMAREALYSAVRYYATEGGHVPELEDAVETALRLIEARPHVAKELALKALARAMSAEKSAAGKGEEKKAG

SEQ ID NO: 803 - DNA, 936 bp, Pyrobaculum arsenaticum
atgttcgtctcctttggatttaggtttagggcggaggtcgaggcgctcaacatggctgagtcggtgggcaactacgcccgccacaggacggcccccgtcgtgataaaagacggcgataggtacagaatcacgttggcccccgccgtctccggccaatcgatagcctacggctacatggccgcgttggttaggctcgcccttgagaggaacatgccgctgagcgacgacgataagcaatacgagaaactgggcggcttcttcaagagagcaaaccaagcagatcttgaccacgacaaaagagttgagacgagcgttgtggaggacatcactggctttatgacgactgaagaggcgcaagcacaggggaggggcagaatggcgcgacggacatcccccctgatgttcagctacttagtgccggacacctcctccgcgagggcggtggtggtgcctcagatgcatgtgaggtacaatttgcagaatccccagcaacaagtcgtctaccaaatcgagtcgggcagcggcatctttattcagacggtagcggttgacgtggggaggataggtctgctgagcaacgggaactacgtaaaagacgtatgtgagcgcgtcaagctggcgtttgacgcgttgaagttgctctacagcggcatgctctttggcgcaaagaaggcgagataccatcccgtattcgagccgcttggcggcgtggcggcggcttcgccaaagccttttgtggtgttgcctccgcgcctcggcgactacgtcgcggagaacctggcgcgcatcaaagccttgggttacggaaagttgttctgcttcgacagagagggtgtgacgagttgcagtaaagcccaaggcgtagagagcagatccacgctggaggagctcgtagaggcagtcaaagaatacgtcgtttcaaaccgctgtaagtaa

SEQ ID NO: 804 - protein, 311 aa, Pyrobaculum arsenaticum
MFVSFGFRFRAEVEALNMAESVGNYARHRTAPVVIKDGDRYRITLAPAVSGQSIAYGYMAALVRLALERNMPLSDDDKQYEKLGGFFKRANQADLDHDKRVETSVVEDITGFMTTEEAQAQGRGRMARRTSPLMFSYLVPDTSSARAVVVPQMHVRYNLQNPQQQVVYQIESGSGIFIQTVAVDVGRIGLLSNGNYVKDVCERVKLAFDALKLLYSGMLFGAKKARYHPVFEPLGGVAAASPKPFVVLPPRLGDYVAENLARIKALGYGKLFCFDREGVTSCSKAQGVESRSTLEELVEAVKEYVVSNRCK

SEQ ID NO: 805 - DNA, 891 bp, Pyrobaculum arsenaticum
atgggaggtaattacctgctggtaaagcttgttttccactccccctactactcctatcctgcaggcgctgagggaggccggggaccgactctgccgccgccctccactctcataggcgcactgatggcagcgtatctcagactgagggggccgagggagggggatccgccgacgagtttggtaaattcggttaaatacgcctatttctgggcgccttcctactccacaaccgccagtcttaatacgcacttcacttggctcacccagcggaaatcgagacttgagctgatagaggccatgaagatattaggcaagacagttgagggtacggcgacggaggaggagctcagaaaagctgtgagtgcgataaaaaactacgggcgggggcctagggatcttcagccagagcacctaaagtcggatccccactcgtggatagccaagctacgggcgatgttattcagcccgtggcccacatacgagacctacttctggggagatgcctacgccctctacattattgaagacgaggagcttaaggaggcgggtaactatatattccgggtaggccccaaggagacgctagtctcctcccgagtagttgaggtgagatcggccagggaggtcaagggctctgtggccacgaggttctacatccctaaggaagccactgtcagcgcttgtcgacgcgttgagcacatgctgacgtctctaggcgctcccgtggagttgatctacattgagaggcgggccaaggagttctgcctgccgacgccgtacaccggagagcttgagtactacgacccagcacctggatgggtcggcgtagagctggagacggacgagggagtcttccaggtggtggtccccgagggctatgccccgcgctaa

SEQ ID NO: 806 - protein, 296 aa, Pyrobaculum arsenaticum
MGGNYLLVKLVFHSPYYSYPAGAEGGRGPTLPPPSTLIGALMAAYLRLRGPREGDPPTSLVNSVKYAYFWAPSYSTTASLNTHFTWLTQRKSRLELIEAMKILGKTVEGTATEEELRKAVSAIKNYGRGPRDLQPEHLKSDPHSWIAKLRAMLFSPWPTYETYFWGDAYALYIIEDEELKEAGNYIFRVGPKETLVSSRVVEVRSAREVKGSVATRFYIPKEATVSACRRVEHMLTSLGAPVELIYIERRAKEFCLPTPYTGELEYYDPAPGWVGVELETDEGVFQVVVPEGYAPR

SEQ ID NO: 807 - DNA, 894 bp, Pyrobaculum arsenaticum
atgccccgcgctaagacgacgaggaccaggtttaggatagagcccacccgcgtggacttggtcacaattagaaaggcaaacgttatgtccattatagctactcaaaaaccgttgtggtctgtaaggcaagaggaagttgggggctacattagactctacaacaacttcgtcgagggggctctcgggggcaaaaagagcaaggatatccaaaagtacctcctcacacaaggagattttgaaaacgtcgagacgtctaacttgaccgacgttttgcctgagtttatggagtatctgaagcgccacgccatgccgtggaaggatagcataaagacgtctaatatgttcgaggtgcccaccgccgtcgtgaagctggcaagcgcgcttgatgctgtgatgggggtgggaatagggggcaagcgctatactgtggttgtggagatggacgaggcgtttgacctccactacagcgctgagcgtctggagaggatggctaacataaaccgtgagctacgacagttctacaaggctaaggtagtggagaacttggggtacacaggcctttacatggccgcagtggctcttttcaacttggctgttggcgtagagtggcgttggggggaggggagggccgcctttgtgatttacagcggtgagagggcgtggccaaacatcactccaatggccgccttacctgcgccatatgcagtgttctacctgagaatcgcccgcgcaggctcggactacgcgaagtcagtggctgaggcgttgcttcgctacgttagaactggcgacttggctgagctgtattccataatccgcaacatggcccagactaagaagctggcccaggcggagagggaggcgctggaggggctactggcgcacatttcatga

SEQ ID NO: 808 - protein, 297 aa, Pyrobaculum arsenaticum
MPRAKTTRTRFRIEPTRVDLVTIRKANVMSIIATQKPLWSVRQEEVGGYIRLYNNFVEGALGGKKSKDIQKYLLTQGDFENVETSNLTDVLPEFMEYLKRHAMPWKDSIKTSNMFEVPTAVVKLASALDAVMGVGIGGKRYTVVVEMDEAFDLHYSAERLERMANINRELRQFYKAKVVENLGYTGLYMAAVALFNLAVGVEWRWGEGRAAFVIYSGERAWPNITPMAALPAPYAVFYLRIARAGSDYAKSVAEALLRYVRTGDLAELYSIIRNMAQTKKLAQAEREALEGLLAHIS

SEQ ID NO: 809 - DNA, 1455 bp, Pyrobaculum arsenaticum
atgaggagggcgataaggaaagccttggagttggcggagaggggggtggataagatagtgtcggagttgcccaccggctacgggaaaaccgtcgccgcgccgttgctttacaagaggtttagggcggctggcctctgctggaaagctatacacgtcttcccgctgagggctgtgctacacacgaccttaaagaggtacgtcacggagcaccccgatatccaattcgcctaccaggacggcgacgtcacgctgagagctgacggctacgtcaaggacccgtggttcacctcagagtacgtcctcacgacgtacgactcctttatccacaacttgcttaaggcgccggtggcggagttccacaaattgctaagccacgggaggggggtgcactaccactggccgatggccgaggtttacccctcgtgcgtttttctcgacgaggtgcacctggcggtggagggggcgaagcaggtcgcggcggttagcgtggtggtgaacatgctgagggagatggaggtgccgacagtggtgctctcggcgacaatggggaggtggaagcacgacatctttaaagacttcgtcttcgtccagctgggggaaaaagacgaggagggcgaccgcctggttgttgtgagagacgaggagttcgagaagtccatgggggaggtggagtacagcgtagatgtgatagatgagaactcggtggcggccttggcgaggagaaaggtgaaggaggggaggcgcgtccttgtcgtgttaaacagcctcaaaaaggtagtcgccctaaaaaacgagcttggggatctcaacccggttttgatacactcaatgctgacgcggagggataggcaggccgcagaggaggaggtcaaaaaggcccagctcgtgatcggcaccagcgcaatcgaggccggcgtcgacacgagcttcgacgtgttgatatcagatactcccagcgccgagtccgtagtgcagagggtaggcagagtatgccgctacggcgggaggtgcaagggggagctctacttcttcggggagggcgcggaggagctacgggaggtgaagcactggaggttgccgtacaagaaggggagctacgccgggttgctcagagagcagatcgagaaggaccgcagactgacgtggctctacgagatgttggcaagggccttgtggatagaggatatcaatgaattgtttaaaaaattgggcgcctccttctttagagaagggctcctagtggaggcagtggcgggtagcggctttgaaatggccttctcggccagcctggggaagcttgtggagctgggatacacggagaccgtcgacggcgagcaggtcaaaggcgacgtctacatctttctccttgactacgttaagcgccgcggcgagctcccagctataagaatacccgactacgtcgagggcgtaggcccagcggcgctttatgagtag

SEQ ID NO: 810 - protein, 484 aa, Pyrobaculum arsenaticum
MRRAIRKALELAERGVDKIVSELPTGYGKTVAAPLLYKRFRAAGLCWKAIHVFPLRAVLHTTLKRYVTEHPDIQFAYQDGDVTLRADGYVKDPWFTSEYVLTTYDSFIHNLLKAPVAEFHKLLSHGRGVHYHWPMAEVYPSCVFLDEVHLAVEGAKQVAAVSVVVNMLREMEVPTVVLSATMGRWKHDIFKDFVFVQLGEKDEEGDRLVVVRDEEFEKSMGEVEYSVDVIDENSVAALARRKVKEGRRVLVVLNSLKKVVALKNELGDLNPVLIHSMLTRRDRQAAEEEVKKAQLVIGTSAIEAGVDTSFDVLISDTPSAESVVQRVGRVCRYGGRCKGELYFFGEGAEELREVKHWRLPYKKGSYAGLLREQIEKDRRLTWLYEMLARALWIEDINELFKKLGASFFREGLLVEAVAGSGFEMAFSASLGKLVELGYTETVDGEQVKGDVYIFLLDYVKRRGELPAIRIPDYVEGVGPAALYE

SEQ ID NO: 811 - DNA, 669 bp, Pyrobaculum arsenaticum
atgagtagttgccaagccgggcctggcgagccgctgggcgaccacctgctaggtgtagctgactgcgtctctaaaaggggcgtgccggtggccaagaagctggcaagggtcttcaagataggggagggcgaggcgctcgacctaataaccttcgccgcgttggcgcatgacgccggcaaggccgacgtgagctacgaaaaggccatcgaccgcttccccctccacgaagtcaagtcaacagcatttgtgaagagagttttccaagaacttagaataatagacaactgtgacctcggccggggcgaggacagcctcgccaaggccgtggttgccgccgtagcgttgcaccactacgtccacaaagagccaaataaggctaccgtagcggatgggctcacgccgaggtgtcttgacgttgcggaggcctttaagcggtggaggccccgaacgtccctgggagaggcgcttaagtccaaggccttggagatcgccgccggcaacgtggggcctaacacatgctatcgtgacgtagtcaacacgcttcacagcgtaagcacgaggctcaggtacgccgcgatggctatattgggagtcctcaacagatgcgactacgaggttgccaaagctaggcgcgccgctgagcatcccggcactcccgcagatatttaa

SEQ ID NO: 812 - protein, 222 aa, Pyrobaculum arsenaticum
MSSCQAGPGEPLGDHLLGVADCVSKRGVPVAKKLARVFKIGEGEALDLITFAALAHDAGKADVSYEKAIDRFPLHEVKSTAFVKRVFQELRIIDNCDLGRGEDSLAKAVVAAVALHHYVHKEPNKATVADGLTPRCLDVAEAFKRWRPRTSLGEALKSKALEIAAGNVGPNTCYRDVVNTLHSVSTRLRYAAMAILGVLNRCDYEVAKARRAAEHPGTPADI

SEQ ID NO: 813 - DNA, 492 bp, Pyrobaculum arsenaticum
gtggacctagagcttgaaaaaccgtggagagatctcaagaagtacattgaggggagggcgaaggaggcgaggtacgaggcggagttggctctgaggtttctcgaagccggtttgatgagaaatgccgcagggaaggccttccaggcatttaaggcgctactgggggcccttgccgctaagcatagggaatatttagcgcagaggtacggaagcgtgaagaggcttagaaacggcaagagggtgtggtacgcggattggctcatcgctgcagtccccaccagcttgttgctagaactagccagggacctctcgccgcttgagaggcccgagcttatgcgctacgccaacatcgccctgaacctgcacgagtttcgatacaacgggcttgacaagagcggtgtcttaagcagatatgcgaggattagctctgtggaggaagacgtgagggccttggcgacctacgttgagaagaggacctcggagctaacctag

SEQ ID NO: 814 - protein, 163 aa, Pyrobaculum arsenaticum
MDLELEKPWRDLKKYIEGRAKEARYEAELALRFLEAGLMRNAAGKAFQAFKALLGALAAKHREYLAQRYGSVKRLRNGKRVWYADWLIAAVPTSLLLELARDLSPLERPELMRYANIALNLHEFRYNGLDKSGVLSRYARISSVEEDVRALATYVEKRTSELT

SEQ ID NO: 815 - DNA, 879 bp, Pyrobaculum arsenaticum
atggagccgaggtttgagcggcggcccatcttgatggcatcttcagggggagtcgcgtatttaagggtgcgacctctttgggctgtgtctgtggtgttggtgcgggggaggcccactgaggccgtcgccatggttggcttcaccgggacggtggcccagtcactagtggtgtccctcctcggcggggagctccacgacgctaggccgaagtccttctccgtcacgccgttcttcgtcaacggtaggccggcggtggacaaggccgtggcggggcccggcgacattctggagctccgcgccgccttcgcccagagggagctcgccgagaggttcatagcggaggtggccaagggctacaccctcttcgggaggagggtcgtggtggaggagctggagttctacgacgtgttctcccagcccctcccagaggcgcagtgcttcaagctggagttcctcaccccgctgagattcgccgtgaagcccctctacaggcgaagccgcgccgtgttcgactttctcccgcggcccctctcggtgtttaaatccgccgtgagacacggcagggctcttggcctattgaagctgggcgccccgttcctccgctgggtgcatacctacgtggcgctcaccgacttcgggtgccgcggcaggtgcgtggtcaccgtcaagctacccaacggcggggtggcgaggggcttcgtgggctgggcgctgtaccgctccttcggcaagaggaggatcgccgacctgtggagggccctccgcgtggcagaggccttcaacctcggcaccggccgagggatgggcctcggcgttgtgagggtgacccctcttgactgtccaggtaacggccccgcggctcagcgcggggacgcatag

SEQ ID NO: 816 - protein, 292 aa, Pyrobaculum arsenaticum
MEPRFERRPILMASSGGVAYLRVRPLWAVSVVLVRGRPTEAVAMVGFTGTVAQSLVVSLLGGELHDARPKSFSVTPFFVNGRPAVDKAVAGPGDILELRAAFAQRELAERFIAEVAKGYTLFGRRVVVEELEFYDVFSQPLPEAQCFKLEFLTPLRFAVKPLYRRSRAVFDFLPRPLSVFKSAVRHGRALGLLKLGAPFLRWVHTYVALTDFGCRGRCVVTVKLPNGGVARGFVGWALYRSFGKRRIADLWRALRVAEAFNLGTGRGMGLGVVRVTPLDCPGNGPAAQRGDA

SEQ ID NO: 817 - DNA, 1191 bp, Pyrobaculum arsenaticum
gtgggcggcgaggtcgtcgttgctcctgtgggcaaccccaaggcgtataggcccgtgacctacgtcatgggcgaggcgcaagtgcgcgagaggctgtacgcctccgccgtgaggagggctaggggggccgggaggctccttctgcttgctggcttcagcttgtgcgagctgtatggcaaatgcaacgacttcaaaagtggcgccgaggcggtggcaaggggcatacgcgaggagctcaggctctccggcgaggccgatgtggcggttctgccgaacgccttgggggccaaattccgcttcgctgatagaaagacagagggctacttcgcatcggcgtatcgcgagatattgaggcggctccacgcctgggacccctcctcaatagtagtggacacgtcccacggcataaactacatgtcgcttatggccgtggaggcagcccgcctggccgcggcggttctcgccgcgtcgcacaggagggctgtggatctgatgttggtgaactccgagcccttggtgggcgatgccgagcgtctccacgtcatggagctacacagggagaggattacgcctagctccgctgtccagctgatcgtccgcccctttcttgtcgacgagaacaagggctacttcctaaaatacgcccgcggatgcggcggggataagccgtttaagtgggggcgcgccctcttcaacggggtctacctgtacctcgcggcgcggcggggcgaggtggcggagtgtagggactctttagaggcggagttcgaggtgcaggttagggaggacggcggtgtctacatctacgagaagtaccccaggccgcaacacgcctacctccacgccatcgtcgaggcggtgtcgggcatattccctgagaagaaaagtgaattctccgctaaggaattggaagacttcgcaagggcttatgcccccagcgagacagttgaggccattgtccgcaacgagcttgacaagctgagtagtctctgcacaaaacccaccgccccccacaagtgggcgaagctgtccgagctatacgacggggtagaggccaagtgtgccgccgacaggaggaacctctacgcccacggcggcttcgagaagaacgtcacctacgtaaagtgtcaagacggagagctgtaccttagctacggcgagtgcctagacgaggtggagcgtcacctgtag

SEQ ID NO: 818 - protein, 396 aa, Pyrobaculum arsenaticum
MGGEVVVAPVGNPKAYRPVTYVMGEAQVRERLYASAVRRARGAGRLLLLAGFSLCELYGKCNDFKSGAEAVARGIREELRLSGEADVAVLPNALGAKFRFADRKTEGYFASAYREILRRLHAWDPSSIVVDTSHGINYMSLMAVEAARLAAAVLAASHRRAVDLMLVNSEPLVGDAERLHVMELHRERITPSSAVQLIVRPFLVDENKGYFLKYARGCGGDKPFKWGRALFNGVYLYLAARRGEVAECRDSLEAEFEVQVREDGGVYIYEKYPRPQHAYLHAIVEAVSGIFPEKKSEFSAKELEDFARAYAPSETVEAIVRNELDKLSSLCTKPTAPHKWAKLSELYDGVEAKCAADRRNLYAHGGFEKNVTYVKCQDGELYLSYGECLDEVERHL

SEQ ID NO: 819 - DNA, 24 bp, Pyrobaculum calidifontis
gagaatccccaaagggggtagaaa

SEQ ID NO: 820 - DNA, 1170 bp, Pyrobaculum calidifontis
gtgaggctcttggtggccacgtgggggagcccgctgacgtggaggagggccaggtacaccggcgtcccgccgcttaactgcccagagggccagaccttcaccgacttgccctgctacaggggggttgtggacagagtcgtggtaatagccctggacagcgccgccgcggcggcggcccctcgcgccctcgtgaacgaggacgcgctgaactgcgcaagagaggcggggctgtcggtgcgggagcggggcggcgacgtggagatcttccccgcggcagaggactaccgcgagtggaggagggcagttgtgaactacgtcaaatgtgtcgccgaggcgtctgggggcggggaggtggacgtggtggtggcgccggcggtggggaggcttgggatgtgtagacacgtgttgagagaccccagggccttcctctccatctctctggcagagctgtacgccctcctcggaggcgaggcgcccagcgagatatacttagacacgacgcacggcgtgaactacgccaccacgctggcgtacgagctcgtccacatgctggcctcgctcgctgtggcgaggggcgcggctgaggcgaaggtccagaccttcaacgccgtggaggcggccggcggcgagtacgaggtggccagggtgtaccaggccaacgtgaggaggatagacctcgccgcggccagggcaaccggcggggcctcgggcaaagtactaagggccctcgccctggcagcgcccctcgccgtctactacgcctgcagagaggcagagccgccaaaggcggaggaagtcgtcgagaggtttgtccaaggcgtaaaaatacgcgcggcggaggagtgcgcagtggaaaagcccgccgtagagccccccgaggtggtctacgggatgttgctcgcctgggaggtgtgcaaggctggttggagcaacgtcgtcaccgagatgaggggcgactacttcaggaagttatcccccctctacgagaccctggtaaacgaagagctcgccgcgttgaacaagctgttgacaaagagaccggcctactgcgcgccgtactacgccttcaaaaacgtaggcccagaaaagtggaagaggcagagaggttgcaaagggggcaaatcaccgagcgcgacatacggaacttcgccgcgcacgccggcctcctag

SEQ ID NO: 821 - protein, 389 aa, Pyrobaculum calidifontis
MRLLVATWGSPLTWRRARYTGVPPLNCPEGQTFTDLPCYRGVVDRVVVIALDSAAAAAAPRALVNEDALNCAREAGLSVRERGGDVEIFPAAEDYREWRRAVVNYVKCVAEASGGGEVDVVVAPAVGRLGMCRHVLRDPRAFLSISLAELYALLGGEAPSEIYLDTTHGVNYATTLAYELVHMLASLAVARGAAEAKVQTFNAVEAAGGEYEVARVYQANVRRIDLAAARATGGASGKVLRALALAAPLAVYYACREAEPPKAEEVVERFVQGVKIRAAEECAVEKPAVEPPEVVYGMLLAWEVCKAGWSNVVTEMRGDYFRKLSPLYETLVNEELAALNKLLTKRPAYCAPYYAFKNVGPEKWKRQRGCKGGKSPSATYGTSPRTPAS

SEQ ID NO: 822 - DNA, 834 bp, Pyrobaculum calidifontis
atgatcgtcaaaattaggcttttggagcccatccacgtcggcgctaagcaggtcagcggcgtagacgacataggcgcagacgcggtgtatgcgaccatcatgcccagcacggccataggggtgttggcctccctggcgggggtgcgcgggggagaccccttccagctctgcagacagctctggggccccctagtggaagtggacgggcgcctctacttccaagccgcgtcctccctctacccagtggaagaggcgggaaggtacatcgcggccgccaagggcgagggggagccccccagggcgaggtacgaggtagtggagctggagaggccgggggtccgccttagggacaaggttgtgcaaaacctctactacgccaagtacctgtgggtcgagggggcgagagaggtggcctacctatactacgccgactgcgaggggctgaaaggcggcgtggaatgggtgggaggcgaggggagagtggccgtggtagaagtgcaagacgacgacaaagtggcccccaagccgtgtagagagggggtgctcctctcgccgctgctcttctacgccgattggccctacgcagaggtggggaaaagcgcaggagttgaaaaatcggggcttgaaaacgtggaggaggtctacggcgtgttggagggcggcagggcgaaggtcaagtcgacgtatgtgggccttggctacagcctcagcttgaggcggaggagggccatataccaagcgttgccccagggcacggcccttaggctcagagagccggccccctcggcggggttgcacagggagaggggctatggcagtctgctgtgcccgtga

SEQ ID NO: 823 - protein, 277 aa, Pyrobaculum calidifontis
MIVKIRLLEPIHVGAKQVSGVDDIGADAVYATIMPSTAIGVLASLAGVRGGDPFQLCRQLWGPLVEVDGRLYFQAASSLYPVEEAGRYIAAAKGEGEPPRARYEVVELERPGVRLRDKVVQNLYYAKYLWVEGAREVAYLYYADCEGLKGGVEWVGGEGRVAVVEVQDDDKVAPKPCREGVLLSPLLFYADWPYAEVGKSAGVEKSGLENVEEVYGVLEGGRAKVKSTYVGLGYSLSLRRRRAIYQALPQGTALRLREPAPSAGLHRERGYGSLLCP

SEQ ID NO: 824 - DNA, 2808 bp, Pyrobaculum calidifontis
atggacttgcgcgagttctttttgacaaaggcgtacgccctcttccacgacccgcccgacaaaatgtgggggctaaagggccacgaggagcgggcctgggacatgttcaacaaggtgcgccgcgggagcccgctagacggcgaactgccggagtgggcgagggaggtggtcaagctggcggaccgcatggccgcctccatggacagatacgccttctactcggggggcggggagggcgtgaagtacgacaagctccacaacctcttcaacccacgcctgtggcgcgccctcgcgccgccggacccggggaaagtcgccgagtacgtcgagaatctgggcggccgagtgagggcggctaaggggcctagagaggcgtaccacgtcctctacgccctattcgaggccctgtggattgacgaggggcttgggccaagcctcgcagacccgagggcccccacccacgacgtgtttgaccacttgtacgcgacggccatggtggccaactggctcctcgccgggggcaagccctccggctacttcgtcaccttagacgtgccgggggtgcaagacttcgtcaaggctgggagaaaggccggcgacatttgggcaggtagctgggccttgtccatggcggtgtggctcaccgtgtggccctttgcctgggagtacggccccgacgtgctcctgaggcccacggcgaggctcaacccctactactacgccttcgccgccgcccgggggctgggggtggaacacggcgtctttgccaaattgctgtccccctacgtcaaaggagagtcgttttacgacttggtcaactttgccgttgtccagccgctgattggggagagggcccagattgtcctgccgccgtaccgcgtcgagggggacaaaattgccagctggggcggggccgaggaggtgagagaggctgtccgagacaggttcaagagggccgtcgagtgtctaacccatttcgcaaaggggcaacggggcgcgggggatgagtactgcgaagacttcttcaaagtggtagaggaggggcgcggagagggaagaggcggaggcgaggtggaaaaaattgcggcatggttgcagaagtacgcagagcttaggctcccgctgagagtggaggtggtggacgtcggcgctgtgtatgacagcataaagtgtccaagggaggtggcgaaggccatagaagaggcgttgggggacggcgaggagcgctgcaaaatcctcttcctcttcgacgccgtattgagaggggggagggaggggacaaagctcgtggaaccccagaggcgcaggttcatccccacgcgaggcccctggtttaagccgggcggatacgacgacctcaacccccacttcaacttcccactagacccaaactggagggtctgtagtctctgcggctctgagcccgccgtcgtcggagtgaggaaggtggcgagggaggggagggaggactacaacgaggaggacttgaggcggatatctgcagaagtggggatagaagtgagtagactgaagaaccacttgcgcaaagtgttgcggcccggcgagtacctaggcccagtgtgcttggccaagaggctgatatacctcagagccgccgaccgggagctcataaaatttgaaagcacagaggacgtggcagtggtaaagctggctgagagtcacgagcaacactatgcagagttagatagagtacaggagtgtgttaaggtggtcaactatttgaggacaacggggggcagagaccttgaggtcatttggggaaacccagaggccatgagacgggactgggacaactgctttaaaaaattcggcaggctccggggggtagagagactcgtgagagagatctttggcgtagagggggacgtggggaaggctgttgaggagttcgcgggccccaggctcttctacgcggtggtgagggcggacggggacagcgttgggaagttgctggagggccacctcccggtcaactggtatggggcggtggcggaggtggtggaaggcgtgggggcggagggccgcgagaaggcgctggaggtgctccgcgccgtagaagagcacatgcgctccttcggcgtgccgccccccgtggtgattacccccacctaccgcgtggcggtgaaccgcgccatggtgctcacctcgctgaaggacttggccaccacggagaagcaccgcggcctgttgatatacgccggcggcgacgacgtagtggcgctgttgcccgtggagactgcgctagacgccgccgcggagtacagagagaactactggggagaagggggcttccacattgtggacaactaccccgtgccagccctggcggcgtatgggagaagcacggcggtgcgcttcgtccacctaatggacctaatgtctgaggagcttgggaagtcctaccacgacctagagcacttggccaaagggggcaggtgggactgctttgaaaaagactcccttacgatcaccagctcgagggttgaggcaaaggcggtcctcccctttaggcggcccagagaggccgtggagaggctgaaggagctctggctcctcatggcccttgggcgcctcagcaagaacgcgccccacgacctcgacgcctacgaggatctgaagagggacttagccgcgtatttaaaggcgtggcgctacgccctaaagagaaacgccagggagctctcccccgagactctaacccgcctcctctgcttcattgagaaatacggcgcagaggcaggcgaggggctgaaagaggccatgaagatactcaggaggttgccatga

SEQ ID NO: 825 - protein, 935 aa, Pyrobaculum calidifontis
MDLREFFLTKAYALFHDPPDKMWGLKGHEERAWDMFNKVRRGSPLDGELPEWAREVVKLADRMAASMDRYAFYSGGGEGVKYDKLHNLFNPRLWRALAPPDPGKVAEYVENLGGRVRAAKGPREAYHVLYALFEALWIDEGLGPSLADPRAPTHDVFDHLYATAMVANWLLAGGKPSGYFVTLDVPGVQDFVKAGRKAGDIWAGSWALSMAVWLTVWPFAWEYGPDVLLRPTARLNPYYYAFAAARGLGVEHGVFAKLLSPYVKGESFYDLVNFAVVQPLIGERAQIVLPPYRVEGDKIASWGGAEEVREAVRDRFKRAVECLTHFAKGQRGAGDEYCEDFFKVVEEGRGEGRGGGEVEKIAAWLQKYAELRLPLRVEVVDVGAVYDSIKCPREVAKAIEEALGDGEERCKILFLFDAVLRGGREGTKLVEPQRRRFIPTRGPWFKPGGYDDLNPHFNFPLDPNWRVCSLCGSEPAVVGVRKVAREGREDYNEEDLRRISAEVGIEVSRLKNHLRKVLRPGEYLGPVCLAKRLIYLRAADRELIKFESTEDVAVVKLAESHEQHYAELDRVQECVKVVNYLRTTGGRDLEVIWGNPEAMRRDWDNCFKKFGRLRGVERLVREIFGVEGDVGKAVEEFAGPRLFYAVVRADGDSVGKLLEGHLPVNWYGAVAEVVEGVGAEGREKALEVLRAVEEHMRSFGVPPPVVITPTYRVAVNRAMVLTSLKDLATTEKHRGLLIYAGGDDVVALLPVETALDAAAEYRENYWGEGGFHIVDNYPVPALAAYGRSTAVRFVHLMDLMSEELGKSYHDLEHLAKGGRWDCFEKDSLTITSSRVEAKAVLPFRRPREAVERLKELWLLMALGRLSKNAPHDLDAYEDLKRDLAAYLKAWRYALKRNARELSPETLTRLLCFIEKYGAEAGEGLKEAMKILRRLP

SEQ ID NO: 826 - DNA, 903 bp, Pyrobaculum calidifontis
atggacagagttagcagggggctcctcatatacgccgtcacgccgctgcacgtgggcgtggggagggccgagggggcccacgtcgacctcccagtgcagcgagacgagttcggcctgcccaccatatgggcgtcgtcgcttaagggcagcttgaagagccacgcgaggagccgctcgcccaacgacgccaagctcgtcttcggccccgacccagacggggggcctcccgaccacgcctccggcgccgccctgttagacgccaggcttttggccatcccggcccgctccgtgaggggggtatgggcctacgtgacctctccccacatgttgcggacctttgtaacctacgccgaggccctcggcgcgtttcagccccttgccgaaaaggcctgcgccctgcttcaagctactgcgggcttgagcgaggggagggccgcggtgtcggaccacgcgctcctccacgggggacggctctttctgaacgaggtggagctccaggcggaggtgaagagggaggtgggggacttcatagaggagttagacaaggcgctggggggagatctcccgaagaaggccctggccgtggtcagcgacgacgttgctaaagaggtggtgaacaggtccacgcttgtccaatacagagtgaggctggacagcgctaggaagacagtggtagaaggcgcgctgtggagcgaggagtacgtgccccagttcaccgtcttcgcctcaggggtggtttgtaggcccgtggcgctcaaagacgcgacgataaaggcggaggagatatgtgaaaagtttacaaagctgttgacgaatgggcaggggaacaaggccaacgtgtgggtcgggggtaaggagacgattgggaaagggctcatctcggtgtacatatggacgaggtag

SEQ ID NO: 827 - protein, 300 aa, Pyrobaculum calidifontis
MDRVSRGLLIYAVTPLHVGVGRAEGAHVDLPVQRDEFGLPTIWASSLKGSLKSHARSRSPNDAKLVFGPDPDGGPPDHASGAALLDARLLAIPARSVRGVWAYVTSPHMLRTFVTYAEALGAFQPLAEKACALLQATAGLSEGRAAVSDHALLHGGRLFLNEVELQAEVKREVGDFIEELDKALGGDLPKKALAVVSDDVAKEVVNRSTLVQYRVRLDSARKTVVEGALWSEEYVPQFTVFASGVVCRPVALKDATIKAEEICEKFTKLLTNGQGNKANVWVGGKETIGKGLISVYIWTR

SEQ ID NO: 828 - DNA, 411 bp, Pyrobaculum calidifontis
gtggcaattgagtgcaccaaggcggtggccgaggcggccgacggcgacgtgaggaggaggtacgcccagcggtgccgcgcgttccacgccgagatcttcaccctcggggtggcccacgtagtggcgctagccgcggcgcgggctggcgccaaggcggtggaggcggggcttaggcattccacctgcggcgaggtggtcaaggccgcgctggcggaggccgggggccccgaggagaagtcctacggcctctacggcgcggtactgctctacgcgatgaggaggaggggctatgtgaagtccacaacgctcctagacgcgttaggcgagctgaaggaccccgcgctaaacgccgcggcgtaccgagccgccgagtggctaaagaggcttgccgaggcctactttaaggcatga

SEQ ID NO: 829 - protein, 136 aa, Pyrobaculum calidifontis
MAIECTKAVAEAADGDVRRRYAQRCRAFHAEIFTLGVAHVVALAAARAGAKAVEAGLRHSTCGEVVKAALAEAGGPEEKSYGLYGAVLLYAMRRRGYVKSTTLLDALGELKDPALNAAAYRAAEWLKRLAEAYFKA

SEQ ID NO: 830 - DNA, 1164 bp, Pyrobaculum calidifontis
atgagggccctcttcagagccacaatcgccacccccctctccctgggctggtacgagccgggggtcctcgacgagcgtttctacatccgccccgcgtctgtgaaaggggtttggcgctggtgggccagggcgtttgtaggcggagtgctctacgagagggggtgcctaaaggggagaaggggtagggacgtcttcttagcccccacgcgggaggaggcggaggccgtgatgaggcacgttgggaagacgctggggttgggatacgccggggaggagggggcgcaggcctcacagtttaggctgagggtgagagtcctccgcaggcccgagaagggcgtcgccaggcgcagggagggcctcgtgagagtggccgggcggcaggccgctctgcagaggtttaagctcctcacgttaaacaacgacgtcgaatacgcagtggggggagagttcgagattgaagtagaggcggaggtggacaggagggtgttcaacgcctctgtaggcgtcctcgccgtggcgcttacgttgagcggactcggcaagggctcccgcaaggccctgggagacttagacgtagtagaggccaggggggtccaactgcccaactctctcccaaagctcgtagaagaggtcagggccgccgtggcggagctgattagggacaggtgcccggggaggcctcagggcctgcccccaatgccggtggtaaccgcggagaagtggagcggcgcagagctcgccgcggtgtacgaggctgggctgggctttgaggacctccacaacttcttcctccgccccgcaagggcgaaggcgctgacggggaactacgccgcgcgcgaccccctgagagagaagctggccgcgtgggtcctaggcctcccgagagagcagaggggcaccggctacacgtcccccctggagaggagggcgtccaccatcatcgcggcctaccacggacagcggcacctggtgggaggcggccgcggctacttgaccgtgttaatctcaggcgactggcccacggagattgagtggagcggcgctggcagtgagaggatacggatagacgaggcgaagatcttagacgcgtataagacagcggtggaggagttcgcggcatacgcccaaaggctgaggagcaacgtcacgaagatatggccgtga

SEQ ID NO: 831 - protein, 387 aa, Pyrobaculum calidifontis
MRALFRATIATPLSLGWYEPGVLDERFYIRPASVKGVWRWWARAFVGGVLYERGCLKGRRGRDVFLAPTREEAEAVMRHVGKTLGLGYAGEEGAQASQFRLRVRVLRRPEKGVARRREGLVRVAGRQAALQRFKLLTLNNDVEYAVGGEFEIEVEAEVDRRVFNASVGVLAVALTLSGLGKGSRKALGDLDVVEARGVQLPNSLPKLVEEVRAAVAELIRDRCPGRPQGLPPMPVVTAEKWSGAELAAVYEAGLGFEDLHNFFLRPARAKALTGNYAARDPLREKLAAWVLGLPREQRGTGYTSPLERRASTIIAAYHGQRHLVGGGRGYLTVLISGDWPTEIEWSGAGSERIRIDEAKILDAYKTAVEEFAAYAQRLRSNVTKIWP

SEQ ID NO: 832 - DNA, 795 bp, Pyrobaculum calidifontis
atggccgtgagggggaggagggagtttgcggggggagacgacccgctgagccgctactgccaagaggactacaacgtcgtctcttgcataaacctcgccttcctcgagtggatgcggcagaaaatcggaaagcccgagggggcacggcagaggagcgaggggctacctgacttctcccgcagggccgtcttgcacctctacagacagccgccgagggccgcccgcgaggaggtggagcgctacgtacaagcgatcttcgacgccgtctcccgcgcctctgcgatggcgtttaagtacgagttcaccctggagacccccctcacaatacacacgaagtggccctacctccccctagagataggcctggcgtggcacccaatactcaacgtcccctacatccccgccagctccctcaaaggcgcggccagggccgccgccgtcagcccgctgtgcggcatagagccagaggacctgttcggaacgacggaggaggagggcgacctaatattcacagacgcctatcccacgaggtgggagaggctggtggagcccgacgtaattacgccccactacagagagaccgccggcgaaatctctgaagcccaagcgaggccggtccccctagtcttccccgtggtcccagccggcaccaccttcaccttcgtagtcgcctttaggcagatggtgggccaggagtgctggggcgagactctgcggtggttgcaacaggtgttgacaaggggcctgggggcaaagacgcagctgagctacggcgtcttcagaagacagacatga

SEQ ID NO: 833 - protein, 264 aa, Pyrobaculum calidifontis
MAVRGRREFAGGDDPLSRYCQEDYNVVSCINLAFLEWMRQKIGKPEGARQRSEGLPDFSRRAVLHLYRQPPRAAREEVERYVQAIFDAVSRASAMAFKYEFTLETPLTIHTKWPYLPLEIGLAWHPILNVPYIPASSLKGAARAAAVSPLCGIEPEDLFGTTEEEGDLIFTDAYPTRWERLVEPDVITPHYRETAGEISEAQARPVPLVFPVVPAGTTFTFVVAFRQMVGQECWGETLRWLQQVLTRGLGAKTQLSYGVFRRQT

SEQ ID NO: 834 - DNA, 1695 bp, Pyrobaculum calidifontis
atgacgccggccccctgccacgaggacctaaaggcctacgactacgtgctaatagtcgcaccaatgggggcgctgggcggctatagagaagttaagtacgtcataccaagccggggcagtgtgggcgaggaaaagggcggacaagacagcgataaaaaacactgggccgtagcttttgcattatatgattatgtacaaggcgtaagtaaggaattatacgcatttattcaagacacaataattgtaaatttagtcaaacctcaaaataaagaaaaaccagtaaaacaagaaatagttgaacaattaaagttactacttaactgtaatgatgacagttgtaccatagatgagaatttaattgacactttacttaaattagaaggaaagacatcggaggctcaaaaaactatagatagactgaaagaattacgtaaagaggcaaagattcactttgtgccaggcgtcatcactagatggatagaggaagtgttagtgacgtggagaggcggcaaccagttctacgacgtgctaaagggcacgcttgtgtactatatcctgtcggcgctcaagaagagttgtcataaaagaattgccatatttgtggatacgtcacacggcataaactacttcgtcaccgccttaaaagaagccgtgccattagccgccacgctttatcttatccacagaattgccgacggggagccggtggagaaactcgacatatgctcctacaactctgacccatatccaactccatcaagggagtgccagtcgcaaaagggcggagatgcgcagaaagataaagctgagcaagcggacaaagaaacgccgagcctaaagatccacttagtagaaagattcgaaatggtttatactcacaaatcggagactgagacgtatacatcaattaacctatacccggtaaggagccttgtcgaagacctatttctcaccatggggttaaaaggcattgtcaattacttaaatcaaaagtgggcactcggcgaagataagtggaagagcataacggcgtctgtagttctctttctgcgcggcatccttggatggagcctcagcatcgcccacagctccaatgaggacatgctcgctgaaataggcgagacagtgaaaaagcgcggaattagaatagagcagagaagcgataagaatgaaatagcaataacttacatatggggtagcaatagaaagatcggcacagacgttgtaacctttgcctctatacactcatcactaaacagattaggcagatgtttagcaacgccaagaatgatagaagggtctccatacgtgtgttacccgactaaagagttagagaaatacatagaacaattctatgcgccgccctacagggagataaacctaaacgaattggcttccgtaaggaattacctagaggggaagaagaagtcagacgaatcctctgtaagagacagtctagaagagaagtcgagagatcgtgagtattgtaagcccttggaggggggcaaggggtttatatgtgggaagagagaagacgcagatcagcaggccgagggcgcaaacccgaggaatttctacgcccacgccggcctctcgttcgagcttgattggggcgccctcaaggaggaaggagagctcctgtgcttcagcaaggaggtggagagagtcataaacattttagcgagtagcgggtga

SEQ ID NO: 835 - protein, 564 aa, Pyrobaculum calidifontis
MTPAPCHEDLKAYDYVLIVAPMGALGGYREVKYVIPSRGSVGEEKGGQDSDKKHWAVAFALYDYVQGVSKELYAFIQDTIIVNLVKPQNKEKPVKQEIVEQLKLLLNCNDDSCTIDENLIDTLLKLEGKTSEAQKTIDRLKELRKEAKIHFVPGVITRWIEEVLVTWRGGNQFYDVLKGTLVYYILSALKKSCHKRIAIFVDTSHGINYFVTALKEAVPLAATLYLIHRIADGEPVEKLDICSYNSDPYPTPSRECQSQKGGDAQKDKAEQADKETPSLKIHLVERFEMVYTHKSETETYTSINLYPVRSLVEDLFLTMGLKGIVNYLNQKWALGEDKWKSITASVVLFLRGILGWSLSIAHSSNEDMLAEIGETVKKRGIRIEQRSDKNEIAITYIWGSNRKIGTDVVTFASIHSSLNRLGRCLATPRMIEGSPYVCYPTKELEKYIEQFYAPPYREINLNELASVRNYLEGKKKSDESSVRDSLEEKSRDREYCKPLEGGKGFICGKREDADQQAEGANPRNFYAHAGLSFELDWGALKEEGELLCFSKEVERVINILASSG

SEQ ID NO: 836 - DNA, 24 bp, Pyrobaculum calidifontis
gaatctcaagaagaggattgaaag

SEQ ID NO: 837 - DNA, 666 bp, Pyrobaculum calidifontis
atgacgtgtctggcagggccctgcgaaccgcttgaccgccacctcttagaggtggccgagtgcgtggccagggaaggcgcgcttgtggcccataagttggccagagtcttctcagtgggccccgaagaggcgcttgacttggtagtctttgcggctcttcttcacgacgttgggaaggccgacgtcgagtacaacgatgagagcggctactacccccgccacgaggttaaatcaaccgctgtagcatacaaggttatgaagcggctgggcttggtggagaactgccgcctaaacggggaaagtgggatcagtggaatctgtaaggcggtgcttgccgcgatagctctgcaccactactcccacaaggccccaaaggccggcgcgtccagctttaaggccaggtgcggcgatcccgtacacgctatcaagaagtggtctccccacacgccgctcggcgcatcaatgaagggggcagtcattgccgcattagaagagggcaccgagaacttgtgtttcgacaacatcgtaaatagtctgagtaaaacaccgccgagactagccagcgcaatttcggcgatactgggcgtgttaaataagtgcgatatagagaccgccaagaaaaatcgatgcaaagagaccacatcgacaactctactaaagagctag

SEQ ID NO: 838 - protein, 221 aa, Pyrobaculum calidifontis
MTCLAGPCEPLDRHLLEVAECVAREGALVAHKLARVFSVGPEEALDLVVFAALLHDVGKADVEYNDESGYYPRHEVKSTAVAYKVMKRLGLVENCRLNGESGISGICKAVLAAIALHHYSHKAPKAGASSFKARCGDPVHAIKKWSPHTPLGASMKGAVIAALEEGTENLCFDNIVNSLSKTPPRLASAISAILGVLNKCDIETAKKNRCKETTSTTLLKS

SEQ ID NO: 839 - DNA, 1467 bp, Pyrobaculum calidifontis
atgagacgcgctattttgagggctgttgaactagtgaggcgtggtgttgacaagttggtgttggagttgcccactggctatggcaagacggaggcagcgcctgtgatttacaaggcgtttagggagcggggggtgtgttggaaggctatccacgtctttcccctgaggacgcttttgcacaagacgcttgagaagtactccaagaaatacggcgacatctctttcacgtatcaggacggcgacatctccctcgtcaagagcgggtacgttaaggacccctacttcaccggcgagtatgtcctcactacgattgattcatttgttcacaacctcttcaaggcgccggtggccgagttgccccggctgttgcgggggaggtcggtgcactaccacgtcccctttgcctacatctatccggcttgcgtattttttgacgaggcgcatattatggctgaggggggacagaaggcggccgcggcgttgagggtcactgtggaggccctcgtcgacgccgagattccagtggttgtaatgtctgccacgctgggggagtggaagtgggaggttttcaagggctttgagtttgtgacgctggggcctaagggcaccgctggctacgacccagattttgaggccgagcttgaggagacaaggtatgtgacaaaggtaatacgtgaagaagacgtgctcgcggtggcgcaggaggaggtgaagagcgggaggagggtgctcatagttgtaaacaacatatctaaggtagttaagtggtaccaagagctgagggactacggcgccgtgcttatccactctctcctgactagggaggacaggcggaaggcagaggaggcgttgtgccccgttccggacaaatgtgaagctcagggggctaggattgtggtagggacaagcgctatagaggcgggcgtagatgtcagctttgacacacttatcacatctgccgactcgcctgagtccgtggcgcagagggttggcagagtgtgcaggcgcggcgggaagtgcgaggggcggatatacgtctttggcaaagacgcagagaggtacctgggcgttagggagtggcgcctcccctacaaggagggtagctacgtgcctctattgtcgaaaaacttggagtcggacaggagactggagtggtttttgcgccaactataccgcatgctctatgttgacccagataacttgtctaaggtctttaaaatttttggatacacctacgttagagaatacggcttgcttgaggtttgtacctccgttgaatacagccctgagaagtgtttctcaacctcgatagacagagtcaacttccccgtgggcgtggtagtagatgggaaggtgcaggaggtggagaaggtagacgagaggtggctaatggagtgggtagagaaccacggcgagtttcccattctctatgcgaagaagtatgtgccaggcgtgggacctctatga

SEQ ID NO: 840 - protein, 488 aa, Pyrobaculum calidifontis
MRRAILRAVELVRRGVDKLVLELPTGYGKTEAAPVIYKAFRERGVCWKAIHVFPLRTLLHKTLEKYSKKYGDISFTYQDGDISLVKSGYVKDPYFTGEYVLTTIDSFVHNLFKAPVAELPRLLRGRSVHYHVPFAYIYPACVFFDEAHIMAEGGQKAAAALRVTVEALVDAEIPVVVMSATLGEWKWEVFKGFEFVTLGPKGTAGYDPDFEAELEETRYVTKVIREEDVLAVAQEEVKSGRRVLIVVNNISKVVKWYQELRDYGAVLIHSLLTREDRRKAEEALCPVPDKCEAQGARIVVGTSAIEAGVDVSFDTLITSADSPESVAQRVGRVCRRGGKCEGRIYVFGKDAERYLGVREWRLPYKEGSYVPLLSKNLESDRRLEWFLRQLYRMLYVDPDNLSKVFKIFGYTYVREYGLLEVCTSVEYSPEKCFSTSIDRVNFPVGVVVDGKVQEVEKVDERWLMEWVENHGEFPILYAKKYVPGVGPL

SEQ ID NO: 841 - DNA, 882 bp, Pyrobaculum calidifontis
atgccgcgccgtaagtcccaagaggcaagctcggccgaggtgtgtgtaaacttggaaaatgtagagaggtttctgaactttgtgtatttctataaggcgaatgccgtctctattctcgtcagcggccgcgaattggctggtgcagatgtggggagtctcgcagagctctttaatagctatgtgagtgggttgaaggtcaaggggggcaagtcgcggagggagggggagtgtggtgattggcagagcctagatccgaaggactttgaggtgtgtggtaaaaggctctcttctgatgagctggtggagatgaaggagtatttgaagtggtcttctaggccgtataagcttaagacgagtgaggtttttaagacgtcgtgtggtattgctaagctggcggaggcggcggataggattatgcgggtgaggataggcgatgtgaattatgtcatggtgattgaggttccgcctgagaagatccacgagcggatgaggatggctgaggttaataggaggttttttgaaatggcgaggggcgatttggggtttactgaactgtttgtcttggcgaatgctcttctggtgcagacgttggggggcaactgtaatgttccagcccgccttgtgttaataagggacccgtactacacctctctgcctctctccgcctcgtctctgtgcagagagaaggagtttgcgcagttttacttggatttggtgcgggcgaggtctggctatacctcgtatgtggcttctgcgcttttgcggtatttgcagacgggggacgttggggagctttacgctattgtgcgtaatatgacgcagagtaggaggcttacttcggcggagcgtgatgcagtgtctaggctggtggcgcgtatatga

SEQ ID NO: 842 - protein, 293 aa, Pyrobaculum calidifontis
MPRRKSQEASSAEVCVNLENVERFLNFVYFYKANAVSILVSGRELAGADVGSLAELFNSYVSGLKVKGGKSRREGECGDWQSLDPKDFEVCGKRLSSDELVEMKEYLKWSSRPYKLKTSEVFKTSCGIAKLAEAADRIMRVRIGDVNYVMVIEVPPEKIHERMRMAEVNRRFFEMARGDLGFTELFVLANALLVQTLGGNCNVPARLVLIRDPYYTSLPLSASSLCREKEFAQFYLDLVRARSGYTSYVASALLRYLQTGDVGELYAIVRNMTQSRRLTSAERDAVSRLVARI

SEQ ID NO: 843 - DNA, 831 bp, Pyrobaculum calidifontis
atgcgttacgtcttgctaaaggtggatttttactctccttacacctctgtccaagtctttgctgaacatggcagaggcccccctgtcccgccgccttcaactctcattggcgccttggccgcgcctttgtaccatcctgaggagaggtgggagttgggggcggatttgctcgacttggttaagtatgtcaccttctgggtccctccctacgccgtggttgaaaacatttctcgccacttctctattttcagtcagaggaaacaacgcgccaaggttatcggtgccgcgatgaagctggtcggaggggggagagtcgcggatgtctacgatgatttaaagaactatgcaaacgttagacagagtgtagaggagttggagagatttggccgttatgatgcggctaggatggccgttcaagttcttcttcagcctgccactaggctggagacgtattttgcggagccggggtacgtgttgtacgtggtagaggataagttggctgaggttgctaagagggtgtttaggattgggcctaaggagtctcttgtggcggctacgccgattgaggttagggtagagccgttagagagcgaggtggtcaagacgcgcttttacgcgcctgaggaggctgggagtcagtggagcaagtgtgtcaacgtctacatgcttgagcgcccgagcaaaaatcctcttgcggatttgaagcgctactgcgtgcctgagccgcttaacgacatggaggttgaggttgggaaaggctggagggctgtgagaattgttggcgagggggttgaactcaaggctgtgttgcctagctatgccgcgccgtaa

SEQ ID NO: 844 - protein, 276 aa, Pyrobaculum calidifontis
MRYVLLKVDFYSPYTSVQVFAEHGRGPPVPPPSTLIGALAAPLYHPEERWELGADLLDLVKYVTFWVPPYAVVENISRHFSIFSQRKQRAKVIGAAMKLVGGGRVADVYDDLKNYANVRQSVEELERFGRYDAARMAVQVLLQPATRLETYFAEPGYVLYVVEDKLAEVAKRVFRIGPKESLVAATPIEVRVEPLESEVVKTRFYAPEEAGSQWSKCVNVYMLERPSKNPLADLKRYCVPEPLNDMEVEVGKGWRAVRIVGEGVELKAVLPSYAAP

SEQ ID NO: 845 - DNA, 936 bp, Pyrobaculum calidifontis
atgtttgtctcaataggtctcaggtttagggctgaggtcgaggcgttgaacatggctgagtctgtgggcaactatgcgcggcaccgcttggcgccgataatcctcgtcagaaggggcgaggacgggtcaataaaggagtataaggtgactatggcccccgccgtgtctgggcagtccatcgcctacggctacatggccgctttggtaaaactcgcgctagagcgcggcctgccagtgagcgaccaggccaagaactacgagaacattggcgggttctttaagagggccgacgatgcgaggctgtcgtacgatgatagggtgaagacgtgcgtaatcgaggatttaaccggttttatggcggctggcgagggtaacgtcgccgtgaggaggacctcccccgtcatgttcagctaccttgtgccagatggcacaactgtgaggggggtcgttatgcctcagctacatgtgaggtacaacttgcagaaccccgaacaacaggttccgttccagattgaggcggggactgcggtgtatgtccacggcgttgcaatcgatgtggacagaataggcaggctctccgacggctcatatgtgtcggacagggcgaagagggttgaggcggcctttgacgccctcaagctcctctacggcggcttgttgtttggcgccaagaaggcgcggtatttgcccatatttgaggctctgggcggggtggctgcggtgtctgacaaacacttcacagtgtcgccgccgcgtttctacgactatgtcgactacaacgctaggcgcgcggcgtcgtacttgggcaaggtggagctcttctgcttcgaccgggagggcatcaccagctgtgggtctcgtaaagatgtaaaagccgccgactcccttgagggctttatagatcttgtgaaggagagcgtcctcaaagccttgtaa

SEQ ID NO: 846 - protein, 311 aa, Pyrobaculum calidifontis
MFVSIGLRFRAEVEALNMAESVGNYARHRLAPIILVRRGEDGSIKEYKVTMAPAVSGQSIAYGYMAALVKLALERGLPVSDQAKNYENIGGFFKRADDARLSYDDRVKTCVIEDLTGFMAAGEGNVAVRRTSPVMFSYLVPDGTTVRGVVMPQLHVRYNLQNPEQQVPFQIEAGTAVYVHGVAIDVDRIGRLSDGSYVSDRAKRVEAAFDALKLLYGGLLFGAKKARYLPIFEALGGVAAVSDKHFTVSPPRFYDYVDYNARRAASYLGKVELFCFDREGITSCGSRKDVKAADSLEGFIDLVKESVLKAL

SEQ ID NO: 847 - DNA, 294 bp, Pyrobaculum calidifontis
atgagtgagcgggagttcaacgtcgagccggtggttgagcttttggctcagttggcgcgggagaaggtctacggcccgctagacttgttgagcagggtggaggacaacgacgagttttacatgaggctggcgcgggaggccctctactcggccctcaggtatctatccacggagaggaggaatgtgcctgagcttgagaaatcggtagagctcgcgttgagggtgattgaaaagaggccctactttgcgaaagagcttgcgctaaaggccttggcaaaggcgatgagtgggtag

SEQ ID NO: 848 - protein, 97 aa, Pyrobaculum calidifontis
MSEREFNVEPVVELLAQLAREKVYGPLDLLSRVEDNDEFYMRLAREALYSALRYLSTERRNVPELEKSVELALRVIEKRPYFAKELALKALAKAMSG

SEQ ID NO: 849 - DNA, 606 bp, Pyrobaculum calidifontis
atgcggctcgcggtgacggtggggtttgacgcagatctagtggttagggccttggctaatattaacgctgatgagatatacttggtgaggggggtgacaggcggcgagggcgacgccaagtctgaggtcacggtgcgtagtattttgaaggcgttgaggaggggggaggagcgggtggttgatctgcgggatttgcctactgggctgaggcagatggctcagattccctttgacgccgtggccttggctggggggccgcgggctcttgtgattgtagccttcgtggccgccgtggtgaagagggcggggctcttcttggtgcctgagtattcgccgcatcctgtcgacgtgtctgggtttgtctcacttgttgctcttggccgtgtttctaggaagaagttggagatcttggctgccttaaattcggaggctgaggtggaggaggtggctagggctgtggggattgatgtttcaactgcgtataggcatctttcttctttggaggaggctgggttggtgaagggggtgggcggtaggaagaagaagtatagcgtagatcctcttgttgttgcgcttgcctctttatttctgcaaaattctggttaa

SEQ ID NO: 850 - protein, 201 aa, Pyrobaculum calidifontis
MRLAVTVGFDADLVVRALANINADEIYLVRGVTGGEGDAKSEVTVRSILKALRRGEERVVDLRDLPTGLRQMAQIPFDAVALAGGPRALVIVAFVAAVVKRAGLFLVPEYSPHPVDVSGFVSLVALGRVSRKKLEILAALNSEAEVEEVARAVGIDVSTAYRHLSSLEEAGLVKGVGGRKKKYSVDPLVVALASLFLQNSG

SEQ ID NO: 851 - DNA, 849 bp, Pyrobaculum calidifontis
gtgttaaccctcctagagatagccagactcctcaaaagggccaaggtagtagcgggaggagccgaggtctcgccagacctcagagggtggagctacgacaagccacccgtcaagccccccgcatacctctccctggcgctgtccgacttcgcctacggctactgccccacggggaggagcctatacctaaaatacgtcgcgggggagcgcggcgccaccaacaaggccctcctcgaggggcaagtactgcactccgtcctcttccgcgccgtcgaggactacaagcgatatgtgtactcaggccagcccatgtcgccgcccctagagggagtcccagaggagctgaagcccaaggccgaggccctctacaagtacatagccgccaggctactcggcgagcaccactacgtctacgcctcccgcaccgcgagggggagagactccgccgccttctacgtcgccccactcgccacccaggtggcagtagacggcacacccctcggcctatccacggtagtggcagacgccgtggccctaggcgcggttgtggagttcaaattcggcccagcccccaacgttgaggccgccctggcgggatacgccatggccatagaggcggagtggggagtcccaatagactacggcatccacgtccaaatctcggtaaacgccaccgtggagtacagagccacggcccacttcctcggagacgacgcccgctccaagttcctagagctcagagacgaggccatagacgtcgtggcctcgggaagagaccccggcccagccccccagtgcaacaaggcctgccccttctaccacatctgccatgcagatcgcagtagctag

SEQ ID NO: 852 - protein, 282 aa, Pyrobaculum calidifontis
MLTLLEIARLLKRAKVVAGGAEVSPDLRGWSYDKPPVKPPAYLSLALSDFAYGYCPTGRSLYLKYVAGERGATNKALLEGQVLHSVLFRAVEDYKRYVYSGQPMSPPLEGVPEELKPKAEALYKYIAARLLGEHHYVYASRTARGRDSAAFYVAPLATQVAVDGTPLGLSTVVADAVALGAVVEFKFGPAPNVEAALAGYAMAIEAEWGVPIDYGIHVQISVNATVEYRATAHFLGDDARSKFLELRDEAIDVVASGRDPGPAPQCNKACPFYHICHADRSS

SEQ ID NO: 853 - DNA, 885 bp, Pyrobaculum calidifontis
atgcagatcgcagtagctagctacgggacgaggataaggacgaggaagggcctcctcgtggtagagaggggcggggagaggcgggagtaccccctgcaccaggtagacgaggtgttcatcctcaccgggggcgtctccataacctccagagccctgagggccctcctccgcgccggggcagtggtggcggtcttcgaccagcggggcgagcccctgggcatcttcatgaggcccgtgggagacgccacaggcgaaaagaggaggtgccaatacgccgcggcggcaggagggagaggcctccagtgggccagagagtgggtgtggaagaagatgaggggccagctccaaaacgtcaaggcgtggaggaggaggctggcccactacggcgactacgtggaacagataggcagagccctggaggcgttaagagccgccgcgtcgccaggcgaggtgatggaggccgaggccgcagccgcagaggcatactggagggcctacggagaggtgacgggctttccaggccgcgaccaggagggaggagacccggtaaacgccgcgttaaactacggctacggcgtgctgaaggccctctgcttcaagtccatactcctcgcaggtctagacccctacgttgggttcctccacgtggacaagtcggggaggccatccctagtcctcgacttcatggaacagtggcgcccccgggtagacgcagtggtggcgaaggttgccggggagctcgccacggagaacggcctcctagaccacaagtccaggctgagagtcgccgcggcggtgctggaggagctgggcgccggggcgaggcccgtttcggcggagatacacagagaggccagggccctcgccagggccatatgtacatag

SEQ ID NO: 854 - protein, 294 aa, Pyrobaculum calidifontis
MQIAVASYGTRIRTRKGLLVVERGGERREYPLHQVDEVFILTGGVSITSRALRALLRAGAVVAVFDQRGEPLGIFMRPVGDATGEKRRCQYAAAAGGRGLQWAREWVWKKMRGQLQNVKAWRRRLAHYGDYVEQIGRALEALRAAASPGEVMEAEAAAAEAYWRAYGEVTGFPGRDQEGGDPVNAALNYGYGVLKALCFKSILLAGLDPYVGFLHVDKSGRPSLVLDFMEQWRPRVDAVVAKVAGELATENGLLDHKSRLRVAAAVLEELGAGARPVSAEIHREARALARAICT

SEQ ID NO: 855 - DNA, 276 bp, Pyrobaculum calidifontis
atgtacatagtggtggcatacgacgtgtcggaagaccacgtgcgcaacaaggtagccgagaccctagccgcctacggcctccagagaatacagcgctcagttttcgcaggccgcctacccccagccctggtgaaggagcttgcggagaagctacgccgagtcacaagaggggcaaacgccgacgtgataatcataagagtagacaagagggccctagacaccgccgtgaggataggccccgctctgccaagggagggcaatgtccacctgcattaa

SEQ ID NO: 856 - protein, 91 aa, Pyrobaculum calidifontis
MYIVVAYDVSEDHVRNKVAETLAAYGLQRIQRSVFAGRLPPALVKELAEKLRRVTRGANADVIIIRVDKRALDTAVRIGPALPREGNVHLH

SEQ ID NO: 857 - DNA, 570 bp, Pyrobaculum calidifontis
atgtccacctgcattaacccatccctaatccgacagtacctctactgtccagccgccgcctactacatcgccacaggcctagccgagccccccaccgagcggatgcgccgaggaaaggagatccagcgagaagccatagaggccatagccaaggccctacaagccgagaaggtagaacacagcccacgcctagagggctggggaatatgcggcgtagtagacgccgtcctctggatacgcggcaggccagcccccctcgaagtgaagtacaccaccccaccccccaaaaccccactaccccacaaagcgcaggccgccgcctacgccctcgccgcccaagccacctaccgcaaagccgcaacacacgcctacatatactacgccgaggccggagaggtaaggacagtacaactcacccaagacctaacccacctcgtcctccaaaccgccgcccaagtagccaaaatactaaaaggctggaccccacacccccagcccacccccaaatgccaaggctgctggtacaaaaaatactgcggccacacccagacacaagtagacacaatataa

SEQ ID NO: 858 - protein, 189 aa, Pyrobaculum calidifontis
MSTCINPSLIRQYLYCPAAAYYIATGLAEPPTERMRRGKEIQREAIEAIAKALQAEKVEHSPRLEGWGICGVVDAVLWIRGRPAPLEVKYTTPPPKTPLPHKAQAAAYALAAQATYRKAATHAYIYYAEAGEVRTVQLTQDLTHLVLQTAAQVAKILKGWTPHPQPTPKCQGCWYKKYCGHTQTQVDTI

SEQ ID NO: 859 - DNA, 810 bp, Pyrobaculum calidifontis
gtggcgtatgtggtgcgggtggtgttggcggctcgggaggggttctcgctgggggggttcacggggactgtggtggagtcgctggtgcttaggctgactgacccctctctccacggcgcggggccgaagcccttctccgtgacgccgctcttcgtcggggggaggccggtggtggacttggctgtggtggggccgggggacctcttggagtttcgggtgggcttcgcgggtgaggggctggcgagggggtttgtggagcggctcctggggggtggggtggagctctttgggcggagggtggaggtggctgaggtggagatgcgggacgtgtggctggaccccctccccgaggcgaggtgctttaagctggagttcctcaccccgacgaggttcgccgtgccgccgctttacaagaggaggcgggccctcttcgacttccttccccgccccctgaccctcttcaagtccgcggtgaggcacgggagggagctcggcctgttgaagctcggcgcgcccttcctccgctgggtctacacctacgtcgccctcaccgacgtggggtgctggtgcaggaggcgcggctcctgcgtgaggacagtgaagcttccaaacggcggcgtcgccaggggcttcgtggggtgggccctctaccgcatctacggcaagaggcgcctcgccgacgtgtggaagaccatccgcctaatggaggccttcaacgtgggcacaggccgcggcatgggcctaggcgtagtccgcgccacccccctcccctgccccggcgaaacagccaaagacggcggccagcggtag

SEQ ID NO: 860 - protein, 269 aa, Pyrobaculum calidifontis
MAYVVRVVLAAREGFSLGGFTGTVVESLVLRLTDPSLHGAGPKPFSVTPLFVGGRPVVDLAVVGPGDLLEFRVGFAGEGLARGFVERLLGGGVELFGRRVEVAEVEMRDVWLDPLPEARCFKLEFLTPTRFAVPPLYKRRRALFDFLPRPLTLFKSAVRHGRELGLLKLGAPFLRWVYTYVALTDVGCWCRRRGSCVRTVKLPNGGVARGFVGWALYRIYGKRRLADVWKTIRLMEAFNVGTGRGMGLGVVRATPLPCPGETAKDGGQR

SEQ ID NO: 861 - DNA, 252 bp, Pyrobaculum calidifontis
atgttggttttctttgtcgccatctttctcttggcctttgcggcgggttttacagtggcgtggattctccagtcggcgcttaaggcggcggcgtatttgacggcgttgtttgccctcgccgttgtggcggcgttcgtcgtgtggaggcatcccctcatgtcgtgggccatcgcggtctcggccgcggcgctctacgcaatggccatggcgggagtcgccgcgtggtggctttggcacaatcggcccaggtag

SEQ ID NO: 862 - protein, 83 aa, Pyrobaculum calidifontis
MLVFFVAIFLLAFAAGFTVAWILQSALKAAAYLTALFALAVVAAFVVWRHPLMSWAIAVSAAALYAMAMAGVAAWWLWHNRPR

SEQ ID NO: 863 - DNA, 1416 bp, Pyrobaculum calidifontis
atgggctctggcgggggcgccctggtctggctcggcggcgacgtctctcagtaccgccaagtgacgtacgtcgtcgacggcagtgagtacaggtctttcatcagcgccgcggccttggccagggctaaaagcccggcaaagctcgccgtcattgtccccgagacgctgtttgaggaaggccactgcgagagctaccgaaagcttttggaggccaagtcgcgctatgggggacgcaggctctttgctagagaatcagattcttttgaagacgccgctgtccacgagctccttaggagaggctttgactgctacgtggtcccccacccgggaatcgcctcgcctctcaggctggtggaggaggggaacgaggtgcgcgtagagcgcggcggtgcgagggagttccccagctacggcttcaacctcgtcttcagctccgtgtacctaatcctctcaaagtacgccaaggactccggccggctctacgtcgatgtgacgcacggcacaaacgtgctgatctcagccaccttgctggcggccgcgctgttgcccatagcctacgacgccgaggtggagatctacgcggcccccgtcatggtcagagtcgaggagggtgccagagtcgagttcctacgcctcgacgaggccacgagggcagtgggagaggtggcggcggggggacaggcgtggaagtggctcgacgagaggctcctccccgtaaggtactacagagaggtgggagagaggctgggcaagtacagagatgtgtacagcggggtaaacgcgttgctcaagaagggcgcccaactgctgtgggcgcttaggagcgggcagttggtagccgcgcggaggctggtcgaggagctgggcgaagagctggaggaggccgagcagaagttcagccgcctcgtctctcaagagctcccactcgacgacaagccgcacgaggagtggggccgacacgcgggggagcccccctggccgcctgtcacaagcatagcgctgacgctgacgaaaagagcagtctcggagctgcgcagcggcaccaacgtcgaattcgtccaaaaaggcctcagactcctggcggagagagagtacgccgacagggccctatccatagcccgcgagtgggccgtggcactcagcctatggcgcaagggcacgcgaggcgaggcaaaggtgggggacagcgagtgggcgaaggcagaggcggaccttgtgaagagagaccccgtcttcgagagagtgcggcagtaccgaaacaggctaatgcacgggaggctgagcagagacgacaacgctagactcaagctaagcgacagagacatagaagtcgaactgcccacggggctaatagacaaggaggaactaaacaaactggcaaacgagctcttaaaaaagctagaagaagagacttga

SEQ ID NO: 864 - protein, 471 aa, Pyrobaculum calidifontis
MGSGGGALVWLGGDVSQYRQVTYVVDGSEYRSFISAAALARAKSPAKLAVIVPETLFEEGHCESYRKLLEAKSRYGGRRLFARESDSFEDAAVHELLRRGFDCYVVPHPGIASPLRLVEEGNEVRVERGGAREFPSYGFNLVFSSVYLILSKYAKDSGRLYVDVTHGTNVLISATLLAAALLPIAYDAEVEIYAAPVMVRVEEGARVEFLRLDEATRAVGEVAAGGQAWKWLDERLLPVRYYREVGERLGKYRDVYSGVNALLKKGAQLLWALRSGQLVAARRLVEELGEELEEAEQKFSRLVSQELPLDDKPHEEWGRHAGEPPWPPVTSIALTLTKRAVSELRSGTNVEFVQKGLRLLAEREYADRALSIAREWAVALSLWRKGTRGEAKVGDSEWAKAEADLVKRDPVFERVRQYRNRLMHGRLSRDDNARLKLSDRDIEVELPTGLIDKEELNKLANELLKKLEEET

SEQ ID NO: 865 - DNA, 807 bp, Pyrobaculum calidifontis
atgggcagtacgggtggcatgaagccgagcttctttgcaattaccgtggggacgtctatcttggctaacgcggctagggaggggattgtccccgaggtttggtcaaggctggcgccggacgacccgaggcaggaggaggcggagcggggccccgtggagaggctggtggagttcgccgtggcggaccccgagaggtgttgcgcggagttgaacactgtggctaaggtggcgaagaggtggcccgccctctttaggcgggtgagggccgccctctacgcctctgacaccggggccggccgccttgcggcgcgggcgctggagggggccttctgcagggcgctggccaagctgggcgtgtcgacggaggactgcgccgccgaggtgaaggtggtgccgggcctgggccgggacttctccaggtcactgggggagctggccagggccgtggcgagagacgtcaagtgcgccaaggcgaggggcgtgaatccgtacgtcgtggccacggggggctacaagccggagtccaccttcgccgtggtggcggcctacctcgcgggggccctcgacgtcttctacgtccacgagagcttccgcgacgtagtcagcctaggcctcctccccatcgacctacacccaaccgcgaggcaggtggcgagaggcgagggggagcccgaggacttggccaaggcgtggggcgtcgacccccaccacctcgtggagctcggcgtgctggccgaggaggccaggcggaggaccctcgcgccccacatagccgccctcatcgacgccctagagacgccctgctga

SEQ ID NO: 866 - protein, 268 aa, Pyrobaculum calidifontis
MGSTGGMKPSFFAITVGTSILANAAREGIVPEVWSRLAPDDPRQEEAERGPVERLVEFAVADPERCCAELNTVAKVAKRWPALFRRVRAALYASDTGAGRLAARALEGAFCRALAKLGVSTEDCAAEVKVVPGLGRDFSRSLGELARAVARDVKCAKARGVNPYVVATGGYKPESTFAVVAAYLAGALDVFYVHESFRDVVSLGLLPIDLHPTARQVARGEGEPEDLAKAWGVDPHHLVELGVLAEEARRRTLAPHIAALIDALETPC

SEQ ID NO: 867 - DNA, 906 bp, Pyrobaculum calidifontis
atgacgtgcagagtctctgcaaagttccagcttggcgggtggacagtggcgctggacgcggaggtggagctggcccccgtcaccctcttcgttgggccaaacgcctcgggcaagtcgcttacgctgtgcagtatagccagggcgctgggaggaccagcggagctggagtgcccagagacagcggcgaggtgcacggaggagaggggacacgtcttcttcctagacgcctacagatccgttgccaaattcgcagaaattgggacagagacctccggcggatttgcgctaaagccgagggggcttaaggcgcttctctcaatgaggcgcctcgccgatccaaagctcttggcagaggcagaagccgcagtggaggaggagctggcgcgtatggagagggcaataagagagatggggctaaaggccgacgcggccgacctactgcccatcgagctggcggtagacggcggggaaatccgctggagagaccgcgcaggcccttcgggggcggggctacgccaactcccggcaggcctctccgccgccatggtggccgcggggctcaaatacgcctacgctgcaaccggggaaaggccagtctacctcttcgtcgaagagccggaggcccacgccgggccgctacaagccttcttcctcggccacctcgccgccgttctcacaaagagggcagaggagcggggggccaagctgtttttcgtagcttctacgcacaacatagacttcataagaggcgcaacgaggaagtggactaagatctatctaatgagcagagaagtgcgcagagacgcgcgagaaatagacctcaggaccagcctggtggagtctatggagtggataccgcacttcccagaggtagctattcttgccaccgtagaagacgaaaaatga

SEQ ID NO: 868 - protein, 301 aa, Pyrobaculum calidifontis
MTCRVSAKFQLGGWTVALDAEVELAPVTLFVGPNASGKSLTLCSIARALGGPAELECPETAARCTEERGHVFFLDAYRSVAKFAEIGTETSGGFALKPRGLKALLSMRRLADPKLLAEAEAAVEEELARMERAIREMGLKADAADLLPIELAVDGGEIRWRDRAGPSGAGLRQLPAGLSAAMVAAGLKYAYAATGERPVYLFVEEPEAHAGPLQAFFLGHLAAVLTKRAEERGAKLFFVASTHNIDFIRGATRKWTKIYLMSREVRRDAREIDLRTSLVESMEWIPHFPEVAILATVEDEK

SEQ ID NO: 869 - DNA, 843 bp, Pyrobaculum calidifontis
atgagggcggttagaattaggcctctgggtccaactcactacggcactaggccgctgtctacgccggggacggtgacgagagacgacgtgtggatagtgccgcagccctccacgttgctgggcgccttagggtatctcgctggcgtgaagatagactgcccggggaaggggccggagggcgcgcttgcggcgcttagggaggtggctaaggcgcttggggtgaggagggtgtgggggcccctcgccgtggtgcgtaggggttccgaagtgctggtgggcgcggcggctgagggctggattaagacgcacatgtgggcgcctagagagcgcggtgaggcggcggggggtgtgccggtggcaaagttctcgagaataggtctcatgttgactgagcataagacggcggcgcagggctacctctacagggcaacctactacgccccggtggaggccgtctacttcatagacgccgacgtggtgcccacgggcctggtgaggctaggcggagagggccggctggccgcggtggaggcggacccagagctgaggcccgacccctacctgccgcccaagagcggcgccgccgtgttgctcacgcccctcctcatgccagagggagagttgcccagttgcataagggctgtgagaggcttagaacagccgggagaggagccgaaggtgaaagtggtgcagtggggtctcggcttcagcgaggtgtgcagagagaggaggcccatgtaccccgccctgccacctggcactgaggtagaggtggagaactgcgaccagtcccagttcttcctaggcgagctgggctacggggctctcgccagacttccatga

SEQ ID NO: 870 - protein, 280 aa, Pyrobaculum calidifontis
MRAVRIRPLGPTHYGTRPLSTPGTVTRDDVWIVPQPSTLLGALGYLAGVKIDCPGKGPEGALAALREVAKALGVRRVWGPLAVVRRGSEVLVGAAAEGWIKTHMWAPRERGEAAGGVPVAKFSRIGLMLTEHKTAAQGYLYRATYYAPVEAVYFIDADVVPTGLVRLGGEGRLAAVEADPELRPDPYLPPKSGAAVLLTPLLMPEGELPSCIRAVRGLEQPGEEPKVKVVQWGLGFSEVCRERRPMYPALPPGTEVEVENCDQSQFFLGELGYGALARLP

SEQ ID NO: 871 - DNA, 2625 bp, Pyrobaculum calidifontis
gtgaactggtttttaaaatcatttgcactactccacgacccgccgcacaaggccctgtggttcgaggacgcggactaccgggtctacgacaaaaacagccacgaagaggaggccgcgaagctcttcgacgaaattttcaagggcatgggcttcggcggagttccagggagcgaagagagcgcggccgtggccgaggccgaccgcctcgccgcgtcttttgaccggtgggccctccccccgagcccgggcaactactgggtgaaggccaagtacatgataaacccctttggccgagagcggagagaaatcaagaagccgaccccccaggagtttagggagaggctggggaagttcgtgggggaggtgaggagggtgctggaggcggcgaagggcgacgagaggtggctctacttcgcattctacgccgcgtacgagctggcgtggattaaggccggcctgcccacgctaccggcggacacaagagtccccacccactccatcttcgaccacctctacgccaccgcctctatgttgaactggacgaggggcggggggtgcctaatggtggtagatctgccgggcatccagtctatcttgaagtctgcgcgtaaggctggggactaccgcgccgggagcctcctagtctccctcgtggcctggcgcgtcgcgtggcggtttatggagagacacgggcccgacatcctgctctccccaacgccgcgcttcaacccgctcttctacgcccagctcgacagaagggtaaagggagtgtgggggctatacgccggggccatgtcctactacgtgggaaagaagttcggcgtaagccagcaattgccagtggacgaatggctccacgggttgattagaaggtcgtcgctgttccccggcactctctacctcgccctgccggagtgcaagggggaagacgaggcctactcctacttcgacgaggttttaaaagaggtgttggaggccgctaggggaggggaggcgccaaacctcccctttgacctaggggggctagatgatggcgtaaagagggtcgtggaggcggggctcaagggcctggagtcggtacgttatctccccatcagagtcgcagttgcgtatgtggaagagggtctgagaaatctcgagaagtggacgacggagaggttcggcatagacgatgaggtgaagaagctactaggcggggacttaaggaggtttctctttgccaggctgttggagatggtcaacgagagaaagaggagggccctgccgaagtaccccagctggttcgacaaggagggtcggccgaggttctctcagacctataagggaacttggatgcacagtagccttgacccaagccagcccgccgtggtgaaattcggcggcgtgtttaaagacggcaatttgacatacgacgacgagacacatagctggctcaagtcgctgggaattgaagagaaaaaagacgcaaacttgactaaggtgtttaagccgaaggaggcgctgggccccgtggacctgataaagagggcgctctacctcagatctgccaagagagctggcattgactctgtggaagtggtagcgctcaactactactaccttaagcattatttcgacagtgaaaggtgtcgagagatcaaggggcttgtggagagagtcttagacggtgaagatgttgaggacgtcttcggctcctccgaggcggcggataggcggctggccgagtgtaagggggctggagaagagccttggacgccggggcttgagtacgtcgttattagggcagatggggacaacgtgggcaagcttctcagggggtgtctgcctaaggagccgcagatgccccaagacgtggaagtcgtgagagacagggaacagtttgaaaaagatatgaagcacgcgttgagagttcttggagctatgcgcgagaccgcgaagcacatctgcggtgggggctacctagttgttccaagcccggcctactacgccgctgtttctgcggcgcttatggtcacagccataggcgacgccgccattgtggaaaaaagccagggagagctggtcttcgccgggggcgacgacttgctggccttctcggctaagcccccctcgtttgacattgtaaaggagactagagagaactactggggggaggggggcttccactcgttgtcggagagctacttcctccccgccctcaccgcatatggcagaagctactcgcttagggttgcccacgcggtgacagacatgatgtctgtggaggtggacaaggcggctgagttgctcgacgaggcgaaggatagggtgccgggcaaagacgccttggctatctccacctctacgggccacgtggggtttaccaaggtgagcgcggtggggagcgttaaggcaatcgccgaggcctacgccaggaggactctcggcagaaatctgccctacgacgtcgaggcgtggggagaggcggcggaggtggagtacgtcctgcggtacttggtaggcagaaacacggacaagaaggagctcgccgacaaggtggtggaggcggcgtgctacgtagatgggcgcggggagaagtggaagaacgccgtcgagctactgaaggctcttagggcgtggatatga

SEQ ID NO: 872 - protein, 874 aa, Pyrobaculum calidifontis
MNWFLKSFALLHDPPHKALWFEDADYRVYDKNSHEEEAAKLFDEIFKGMGFGGVPGSEESAAVAEADRLAASFDRWALPPSPGNYWVKAKYMINPFGRERREIKKPTPQEFRERLGKFVGEVRRVLEAAKGDERWLYFAFYAAYELAWIKAGLPTLPADTRVPTHSIFDHLYATASMLNWTRGGGCLMVVDLPGIQSILKSARKAGDYRAGSLLVSLVAWRVAWRFMERHGPDILLSPTPRFNPLFYAQLDRRVKGVWGLYAGAMSYYVGKKFGVSQQLPVDEWLHGLIRRSSLFPGTLYLALPECKGEDEAYSYFDEVLKEVLEAARGGEAPNLPFDLGGLDDGVKRVVEAGLKGLESVRYLPIRVAVAYVEEGLRNLEKWTTERFGIDDEVKKLLGGDLRRFLFARLLEMVNERKRRALPKYPSWFDKEGRPRFSQTYKGTWMHSSLDPSQPAVVKFGGVFKDGNLTYDDETHSWLKSLGIEEKKDANLTKVFKPKEALGPVDLIKRALYLRSAKRAGIDSVEVVALNYYYLKHYFDSERCREIKGLVERVLDGEDVEDVFGSSEAADRRLAECKGAGEEPWTPGLEYVVIRADGDNVGKLLRGCLPKEPQMPQDVEVVRDREQFEKDMKHALRVLGAMRETAKHICGGGYLVVPSPAYYAAVSAALMVTAIGDAAIVEKSQGELVFAGGDDLLAFSAKPPSFDIVKETRENYWGEGGFHSLSESYFLPALTAYGRSYSLRVAHAVTDMMSVEVDKAAELLDEAKDRVPGKDALAISTSTGHVGFTKVSAVGSVKAIAEAYARRTLGRNLPYDVEAWGEAAEVEYVLRYLVGRNTDKKELADKVVEAACYVDGRGEKWKNAVELLKALRAWI

SEQ ID NO: 873 - DNA, 921 bp, Pyrobaculum calidifontis
atgaacggcaaattgatgtggatactgtcgctcacctctctacacccaggcgtgggtaggagcgaggaggcccaggtggacctccccgtccagcgggacgagttcggcctgcccacaatatgggcgtcgtccctcaagggcgccattaggagccggatagagaagacgctcttcaacaacggggtctgcgtcggcgacaaaggcgagtgcgccaccttcctcgccgcctttggcccacgccccgacgccgcccacgaacacgcctcgggcgtcgtcttcctagacgcaaaactcgtggcaatccccgccaggtcgctgaggggggtatggctgtgggccacctcccccatgttgctgaacttcgtgaagctctacgcaaaggccctaggcgtcgatgtacaactgccgcagccccccgccgtgaaggagggccaagtagcgctcacaagcggcgactacgccatagacggcaaactcgcggtaataaacgagatggagttcgaagtcgccacaacccaagccccacccctcaacctaccgcccatcaaggccgcaacccagatagtggggacgcgaggcgtggcgtacctccacgacaacgacctcctacaggtagtgaagaggagcctcctcgtccaataccgcgttaggctaaacgagaaaaagacagtagagactgggccatggagcgaggagtacataccaccattcacagtcttcgcctcaggcatatactgcgccagaaagccagacaaggtaaaggtaaaactccccaagaaagaggggcaagatcaacacccagtggaggaggtcgacgtgaagggagacctctgccagtacgtggctgggaaggccagcggcgtcttctggctcggcggaaaggagactgtgggaaagggcctggcggaggtgatatggtag

SEQ ID NO: 874 - protein, 306 aa, Pyrobaculum calidifontis
MNGKLMWILSLTSLHPGVGRSEEAQVDLPVQRDEFGLPTIWASSLKGAIRSRIEKTLFNNGVCVGDKGECATFLAAFGPRPDAAHEHASGVVFLDAKLVAIPARSLRGVWLWATSPMLLNFVKLYAKALGVDVQLPQPPAVKEGQVALTSGDYAIDGKLAVINEMEFEVATTQAPPLNLPPIKAATQIVGTRGVAYLHDNDLLQVVKRSLLVQYRVRLNEKKTVETGPWSEEYIPPFTVFASGIYCARKPDKVKVKLPKKEGQDQHPVEEVDVKGDLCQYVAGKASGVFWLGGKETVGKGLAEVIW

SEQ ID NO: 875 - DNA, 1050 bp, Pyrobaculum calidifontis
atgagagctgaattcgaggtaacgatagcgacccccctctccgcgggctggtacgaccccgccctagtggacagaaacttctacatccgccccacggagatcaaaggagtgtggcggtggtgggctagggccttcgccgccggcgccctgtacgaggcgggttgcacaggcccagacttcctcaggcgggtacacgaaattgtggcagagagacttggcctaggctccaccaaagccgcctcgcggtacgacctcacagtggaggtgctggagaggcccagagtagtcgacagctcgagggaaaatctccagcgatttaggctattgaatcttggcagaagaaagggaagacctgcagttgaatatgcgattggtgggagattcaaaataattctagagggtgacgctgatatccaattagttgcatccatattagcagtagctctaaccctctcgggcataggcaagggaggccgtaaagcacttgggtctcttgatattatcagagtctctggggccgcaccccgacgcccgctaaatgaaataataaacgagataagacgacaaatatcagtacaacgatgtgggcctcctagggaactccccaagatttctgctgtgtcgaatgaggtatttgaagtatacaaagtgaacgtggacttccatcatcttcataatatgttcctaagatcagaaagagctagaatggcaaagttgtactacgccgcaccagacccgcttaatcaaaaggcatggttccttggcctaccaagagagcagaagggcacaggctatcatatcaacgacatagaggtgaagagaagggcttcgcctatctttgttgcgtggcattccatccagcatgtattcggaggcggaggctatatttccatatttctctcgcaagattggcctactcaacttacttgggtaggagagagcggtagaaaactaattcagataaatgaacaaacgctccgagatgccaagtcggccttccttgctctcttaaaccaattcgggtggaagccgcagagggtatggccctag

SEQ ID NO: 876 - protein, 349 aa, Pyrobaculum calidifontis
MRAEFEVTIATPLSAGWYDPALVDRNFYIRPTEIKGVWRWWARAFAAGALYEAGCTGPDFLRRVHEIVAERLGLGSTKAASRYDLTVEVLERPRVVDSSRENLQRFRLLNLGRRKGRPAVEYAIGGRFKIILEGDADIQLVASILAVALTLSGIGKGGRKALGSLDIIRVSGAAPRRPLNEIINEIRRQISVQRCGPPRELPKISAVSNEVFEVYKVNVDFHHLHNMFLRSERARMAKLYYAAPDPLNQKAWFLGLPREQKGTGYHINDIEVKRRASPIFVAWHSIQHVFGGGGYISIFLSQDWPTQLTWVGESGRKLIQINEQTLRDAKSAFLALLNQFGWKPQRVWP

SEQ ID NO: 877 - DNA, 705 bp, Pyrobaculum calidifontis
atggccctagcctgcctcagaccgggctacaacatctacagttgcgtagtgaggcacatcatcagcgcttacgagggccccgggtctccaaagttcacagaactaagtaatcaaattacagttgagctaaaggatgtgaaaattgacacggcccccatctccgcctacctgatgtacctagaggagaagctcaagggaggctccctcgtggcgcggatagaggcagaggtgaccacccccctcgtcgtccacgtgagaaacccctacatgcccctggagataggcctggcgtggcacccctacttcaacgccccctacatccccgccaccaccataaagggagccctcagggcgtactccccgccccagatctgcggaaggccggccgcagaggtctttggcacagtaggcgaccaaggcgcactaatagtgacagacgccctccccataaccccagacgtgttgggcgccgacgtgataaccccccactacaaagagccagaccaggtagaagaacacaaggtgagaccgatccccatagtcttccccgtggtaaagcccggcgcgagattcgccttccacatagcctccacagagctagaacagcggtgcctctccgagatatggccagccatagacagagccttcgcaaaaggcataggagcaaagacaaagataggctatagcagactcaaaaaactataa

SEQ ID NO: 878 - protein, 234 aa, Pyrobaculum calidifontis
MALACLRPGYNIYSCVVRHIISAYEGPGSPKFTELSNQITVELKDVKIDTAPISAYLMYLEEKLKGGSLVARIEAEVTTPLVVHVRNPYMPLEIGLAWHPYFNAPYIPATTIKGALRAYSPPQICGRPAAEVFGTVGDQGALIVTDALPITPDVLGADVITPHYKEPDQVEEHKVRPIPIVFPVVKPGARFAFHIASTELEQRCLSEIWPAIDRAFAKGIGAKTKIGYSRLKKL

SEQ ID NO: 879 - DNA, 30 bp, Pyrococcus furiosus
gttccaataagactacaaaagaattgaaag

SEQ ID NO: 880 - DNA, 258 bp, Pyrococcus furiosus
atgtacattgtagttgtctacgatgtgggagttgagagagtaaacaaagtgaagaagttccttagaatgcatcttaattgggttcaaaacagtgtctttgagggcgaagttacacttgcggagttcgagagaataaaagaggggctcaagaagattatagatgaaaatagtgattctgtaataatttataaacttcgctccatgccaccaagagaaactttaggaatcgaaaagaatccaatagaggaaataatttaa

SEQ ID NO: 881 - protein, 85 aa, Pyrococcus furiosus
MYIVVVYDVGVERVNKVKKFLRMHLNWVQNSVFEGEVTLAEFERIKEGLKKIIDENSDSVIIYKLRSMPPRETLGIEKNPIEEII

SEQ ID NO: 882 - DNA, 969 bp, Pyrococcus furiosus
atgagaaaaaagtctttaacaattttttctgacggaacgctgttgagaagggaaaatacattgtactttgaaaatgtgaatgggagaaagcccctggcaatagagggaatatatgatatttatatatacggacacgtgaacataacttcccaggccctacattacatagctcaaaagggaatacttattcacttcttcaaccactatggctactatgacggaactttttaccctagggaaacccttctctctggagatttaatcataaaacaggctgagcactatttagataagaacaaaagactttttctcgcaaaatcctttgtggttggaggagccaagaacatggagaagaacttgaaaaattggggcattagttcagactttagtaaccatctaaaggaacttcaaggggctaagaaagtaactgaaattatgaatgttgagggaagaattaggcaggaatattacgctaggtgggatgaatcactacctggggaatttagaattggtaagagaacaagaagaccacctaaaaacgaaatgaatgcgttgataagctttctaaactcgagactctatgcgactatgataagtgagatctacaacactcaacttgcccccacaattagctatttgcacgagcctagtgaaaggagattttctctagctttggacttaagcgaaatatttaagccaataattgccgatagaatagcaaatagactcgttaaaaaaggcatcattaagaaggatcactttagagaagatttaaacggtgttctccttacagatgaaggcatgaagattgtaactaaagcttacaaccaagaactcgagaaaacagttaagcatccaaagcttggaaagggagttacgaggcggagattaatacggcttgaagcttataagataataaaacatttagtgggggttgaggagtacagcccccttgtcgcgtggttttaa

SEQ ID NO: 883 - protein, 322 aa, Pyrococcus furiosus
MRKKSLTIFSDGTLLRRENTLYFENVNGRKPLAIEGIYDIYIYGHVNITSQALHYIAQKGILIHFFNHYGYYDGTFYPRETLLSGDLIIKQAEHYLDKNKRLFLAKSFVVGGAKNMEKNLKNWGISSDFSNHLKELQGAKKVTEIMNVEGRIRQEYYARWDESLPGEFRIGKRTRRPPKNEMNALISFLNSRLYATMISEIYNTQLAPTISYLHEPSERRFSLALDLSEIFKPIIADRIANRLVKKGIIKKDHFREDLNGVLLTDEGMKIVTKAYNQELEKTVKHPKLGKGVTRRRLIRLEAYKIIKHLVGVEEYSPLVAWF

SEQ ID NO: 884 - DNA, 510 bp, Pyrococcus furiosus
atggaagagtacgccttagaggagctgtttgttaggggaattgagatcaactatctctatgtttgtccaactaagctatggttttttacacatgggataactatggagcaagagagcgagtgggtagacttgggcaagtttcttcatgagcagaggtacgaaaatgaagaaaaagaagttctaataggcccaataagaattgattttatcagcaggggagatgttattgaggttcatgaagtaaagcttggaaagagaatggagagagctcatgagatgcaggctctctactatctctattaccttaagaagcacggtataaaagcaaaggcaatactccattatccaaagctgaacgagaaaagggaagttacactggaggggagagaaagagaggttgaggaagctatagtggaagtcgaggtaataaaatcctcttctaagcctcccaagcccaggaagagtaagatttgtagaaaatgtgcgtataaggaactttgttgggggtag

SEQ ID NO: 885 - protein, 169 aa, Pyrococcus furiosus
MEEYALEELFVRGIEINYLYVCPTKLWFFTHGITMEQESEWVDLGKFLHEQRYENEEKEVLIGPIRIDFISRGDVIEVHEVKLGKRMERAHEMQALYYLYYLKKHGIKAKAILHYPKLNEKREVTLEGREREVEEAIVEVEVIKSSSKPPKPRKSKICRKCAYKELCWG

SEQ ID NO: 886 - DNA, 2175 bp, Pyrococcus furiosus
atgaaaccgtgctttgcaaaatttcttccacatgacttcctagagtgtcacgtcatggacataataaatgttctcaaaagcatgaaagtagctttcccctggttggagggtatattcccagaagtctggacgctggcattttacgcaattgttctccacgacctgggaaagtgtgctttaggtttccaaaagaacccaaaaaagtggggatataggcatgagattctctccaccccatttattcaatttttggacttcaaggacgagcacaaaatgttgataggcttgtctattctaacccaccatagaccgataagcgaggtaaagaattacattccgattgaagggtacagggaagcatatgaagaaaaagttgaagagctacttgaaaatagagagtacatcgaactgtacttctcaagagttcctctttgggaaatatacgtgtttggagaaaggaaggatttctttgtattgccaaagaattgggaggagaagataagaaactttcggtttgaggagttattggattggtacgaggataaagtaaatgagtttaaggattatatgacagttttaaagggcctattaaatgcttgtgaccatctagcctctgcaggaggaaccacaataagattccttccagacatagaggaacttgtagagatgaaaatcccaaggggaaagtggagacctctccaacttttatcctctacaacagaggggaacgcaattctttatgctccaacaggttatggaaagactgaagcggcccttctatgggcaaataaaaatgctcacaaagttaagaaggggatatcaagcagaatattctacattcttccctataaggccagcataaatgccatgcatagaaggttgttggagatgtttaaagacccaggattagttggccttctccacagctcatcagggatttatctttattcatcttcattggaacacaaaaggttgcaatctctctatggaaagatctactccccactgaagatcacaacacctttccaaataatgaaggcattttttggagttggattctttgaaataacattagtggagctaatgaactctctattaatttttgacgagattcacgcatatgagcccaacatcctgggaattatactagctatgctagaactgctaaaggataaaaacgtgaaagttctcgtaatgacggctacttttccaaaatttttggaagagctaataaaatcggtcttaaatcctaaagagctcaaaacacctccagaagaggccgataaattcacgagacatagggtgaacataattgaaggagatatacagagtctagactcggaggaattttctgggccaaggcctacattgattgcttgtaacaccgttaacactgccatagatgtgtattcaagactcaaagagagcggagcaaacgtcatgctaatccatgggagatttacatacggtgatagagaagagaaagaaaaaaggctaatgagctctctaaataattatgacttcgtagttgctactcaagtgatagaggtttctctcgacatagactttggaagcatcattacagaaccggccccacttgacgctctaattcaaaggtttggaagggtaaacagaagaggatttgggaatcctagagatgtttatgtgttgacgaaggggagtgaggatgataagaaagtgtacaaaccctacgaagttgttgaggagaccgtaaagatacttagagatttagatgggaaggagcttaaagagtccttaattccatcattgataactgaagcatacgagaaagaagagaagaaaatagtcagtaaagtccttgagtacaaagaagatgctctaaatctgtttaaggatataagacctatggatagttatataaagggagaaaccgcattctacgaactatttggtggacttgaagcaattccaggagcttatcagcataaggcagatgaactcctaaagaagggatattacatggaagttcacaagtatctggtccctattccatattggctattcttttctgagcaggaaaactttcatagactctcagatagagggcctgggagatatttacttgttgctgaattagattattcacccgaaatgggtttattaagaaaaccccgtgagggggatattctctaa

SEQ ID NO: 887 - protein, 724 aa, Pyrococcus furiosus
MKPCFAKFLPHDFLECHVMDIINVLKSMKVAFPWLEGIFPEVWTLAFYAIVLHDLGKCALGFQKNPKKWGYRHEILSTPFIQFLDFKDEHKMLIGLSILTHHRPISEVKNYIPIEGYREAYEEKVEELLENREYIELYFSRVPLWEIYVFGERKDFFVLPKNWEEKIRNFRFEELLDWYEDKVNEFKDYMTVLKGLLNACDHLASAGGTTIRFLPDIEELVEMKIPRGKWRPLQLLSSTTEGNAILYAPTGYGKTEAALLWANKNAHKVKKGISSRIFYILPYKASINAMHRRLLEMFKDPGLVGLLHSSSGIYLYSSSLEHKRLQSLYGKIYSPLKITTPFQIMKAFFGVGFFEITLVELMNSLLIFDEIHAYEPNILGIILAMLELLKDKNVKVLVMTATFPKFLEELIKSVLNPKELKTPPEEADKFTRHRVNIIEGDIQSLDSEEFSGPRPTLIACNTVNTAIDVYSRLKESGANVMLIHGRFTYGDREEKEKRLMSSLNNYDFVVATQVIEVSLDIDFGSIITEPAPLDALIQRFGRVNRRGFGNPRDVYVLTKGSEDDKKVYKPYEVVEETVKILRDLDGKELKESLIPSLITEAYEKEEKKIVSKVLEYKEDALNLFKDIRPMDSYIKGETAFYELFGGLEAIPGAYQHKADELLKKGYYMEVHKYLVPIPYWLFFSEQENFHRLSDRGPGRYLLVAELDYSPEMGLLRKPREGDIL

SEQ ID NO: 888 - DNA, 630 bp, Pyrococcus furiosus
atgataagggtaaaactgaagtcctggacggcttcatttcgttatcccacctttcaagctggaaatcaacctacccttccagttccccctccctccactattcagggaatactttccgctgcaaagggcgagcctgtatatctctctgaactcccttacgttggctatgttttcaaaagtgaaggtaggggagttgacttagagaggatatattccctctctaaggaagaaacagatgttattgcaagagaagttctttataatgcggaactcaacctctaccttccagatgagtgggagaggtatttcagaaagcctagataccagcttctcctgggaagatcaagcgatctagcaaccgtggaggaaattaagaaagtggagcttggggagaaaaaagctccaataggagggacagttgtgccaatagacctgggcatacctgggatagttcacgcactggttgttgagtatgactattcaacgattcccaggaagccaagactaattaaaccctttgtaattcttcccttccctagaaatatgggagaaaggaaaagacaaacggcaaaggccttatatgatcctgatttagacataggagtttatctgcataggtggaggccatga

SEQ ID NO: 889 - protein, 209 aa, Pyrococcus furiosus
MIRVKLKSWTASFRYPTFQAGNQPTLPVPPPSTIQGILSAAKGEPVYLSELPYVGYVFKSEGRGVDLERIYSLSKEETDVIAREVLYNAELNLYLPDEWERYFRKPRYQLLLGRSSDLATVEEIKKVELGEKKAPIGGTVVPIDLGIPGIVHALVVEYDYSTIPRKPRLIKPFVILPFPRNMGERKRQTAKALYDPDLDIGVYLHRWRP

SEQ ID NO: 890 - DNA, 1056 bp, Pyrococcus furiosus
atgaagtttgctgcaggttttgtcttgattgacgccccccactctgccctgaacatgttggggattgacgaaaatctgcccgacagaaacgttacgagagtaaaaaccctcagaaggggaggaaacagatacgtatatgtctctccacaggcatggagatactggtggagaaccacacttaaagagtatttcaagtgggaactctctccgctgtttagggaagagaaacaagtgtttacagcggcaaatccaattaaatacccagatgatgatgtttttggatatatgagggcttataagaaaaacaacgtaaatgtcactgttacgagggtttctccactaaaaaacacgcctctaatttcagtacttcctgacaggagctctctaacaatagatgaaggctacgcctctaggcatgagggggatcccgttccctacagccaagaattttattcaacagttctcaagggagcattttcacttgacttggatttggtgggtagatttacaactaagaacaaggctggatataagaacctacttacaagaagcgacattccaaagaagggaaaggccggagagatagttaaagaaattgaagaattagaaaagttggctagggagattggagtggagattaaggaagaggagtggataatgcctaaagaggttagaaaaaagagagcagtagaaactataaaggcccttcgctacttgactggaggggcaaaacagactcaatatcacactgacgttactccaaagttcttcctggggataattgtcaacggtggcataaacccattcattagtggaattgtcagggaagaaaaaggagaaataattttagatgctgaagcgttagctacaaggttggaagacttctcggagataatagattctgagctgtttctaggatacgacaagggatttgtaaaagagctaggactggacatagaggcattgaagtctgctgttagcattgaagtaatggaaggaaaagttggagaggttattgagagttttgcggaagaagctgggaagtattatttgtaa

SEQ ID NO: 891 - protein, 351 aa, Pyrococcus furiosus
MKFAAGFVLIDAPHSALNMLGIDENLPDRNVTRVKTLRRGGNRYVYVSPQAWRYWWRTTLKEYFKWELSPLFREEKQVFTAANPIKYPDDDVFGYMRAYKKNNVNVTVTRVSPLKNTPLISVLPDRSSLTIDEGYASRHEGDPVPYSQEFYSTVLKGAFSLDLDLVGRFTTKNKAGYKNLLTRSDIPKKGKAGEIVKEIEELEKLAREIGVEIKEEEWIMPKEVRKKRAVETIKALRYLTGGAKQTQYHTDVTPKFFLGIIVNGGINPFISGIVREEKGEIILDAEALATRLEDFSEIIDSELFLGYDKGFVKELGLDIEALKSAVSIEVMEGKVGEVIESFAEEAGKYYL

SEQ ID NO: 892 - DNA, 1338 bp, Pyrococcus furiosus
atgtttagctggacgggacacccctttgttgacgggggcttagcagctcttcttttatattccgaaaaaactagaccggaagagttaacccaggaagacattgaaaaagccataaaatttgcatctgaactatacgccagaaaagattggagttcaagttatctccacgccctcctctttccaaatagtggtcttttaatggctaacccaagcatggcaaagaaaagaactcctgaaaatatagcaaaaaacttagaaagcctacttaatgaaaaggaagaccccaatgcaccaatttgtgaaatctgtgggaggagacactcacgtagcaagcccgtttatcgctctgaattccctctcattgggagtggaggagttccaaactatttcccctcaggaaaagagggtgcgaacatctgctctcattgtttgttccttgtacaattcttaccactaattctctaccgccttcgtagattacttctcatccacacatatcccccagagctgatgttggaacttcacagagaagcgttaaaagatgttcgtcttaccaagttagtttcctctgggagagggtaccaaaggcccgaaaatttcttgtttacccttctcactgaggttaccattaaaacagaaagagaggaactttgggaaaatgcatcaattaccctttactacttcacaaatccaaacagagaaagaccgaaaatgatgataattcacgttccttcttctgtgactagatttgtggctcacgcggctaggcatgatttaagtggatggaagagaatagtggccatgggatggaaaaaaggtagtgatgagaaaagcagtccaaacgaggtctatctgaagcttttgaatggcgaaagcattctaccctacttcattaatgttgctaaaaggagaacaaatgctagctgggatcttctctccttttattgtacggaggtgttaggattggatgaaaaggccctcgaatttattaaagaggtaggggataggatagttgaaactctaaaagagctcccagacaataagctgtctgcaagggttagagagctcgaaagggcagaaaagctctatcagtttgaggcattttttgtaaacttagaaaaacttcgccagaggttgggccttaaagatccactattgacgtttgatgagtttgcaagagtactaacaatttatggagaagatttggaaatttcttggagaactgtccggaaccttttgctttttaggatttatgaaaagctccacgacagacttgctaagattgaagcttctgaagaagctgaattttatggagctggagaggaggtggaagaatga

SEQ ID NO: 893 - protein, 445 aa, Pyrococcus furiosus
MFSWTGHPFVDGGLAALLLYSEKTRPEELTQEDIEKAIKFASELYARKDWSSSYLHALLFPNSGLLMANPSMAKKRTPENIAKNLESLLNEKEDPNAPICEICGRRHSRSKPVYRSEFPLIGSGGVPNYFPSGKEGANICSHCLFLVQFLPLILYRLRRLLLIHTYPPELMLELHREALKDVRLTKLVSSGRGYQRPENFLFTLLTEVTIKTEREELWENASITLYYFTNPNRERPKMMIIHVPSSVTRFVAHAARHDLSGWKRIVAMGWKKGSDEKSSPNEVYLKLLNGESILPYFINVAKRRTNASWDLLSFYCTEVLGLDEKALEFIKEVGDRIVETLKELPDNKLSARVRELERAEKLYQFEAFFVNLEKLRQRLGLKDPLLTFDEFARVLTIYGEDLEISWRTVRNLLLFRIYEKLHDRLAKIEASEEAEFYGAGEEVEE

SEQ ID NO: 894 - DNA, 1023 bp, Pyrococcus furiosus
atgaaggaagtagttaaattggttctcctgggggagagacagaactcccttaacctctcactatacttcaacaaatatcctccaaccataatctatccagaggtactggaagataggaacaagaaacttgcttcaccctcaggatcacagagaaagatatccctcttggtcttaaatcaaggggttcttcagtttaacaaaataaaagagacaatagaaaagtcgttgccaattgaaactaaggtaaaacttcctcaaaaagcatatgaattgtacaagaaatactaccaggattacactgacatgcttaactcattacacgccattactggaaagtttaagactcaatcaaggctcgtagttgggcttggtgatgaaagcgtttatgagacaagcataaggcttcttagaaactatggagtgccttacattcctgggtccgcaattaagggagttactaggcacttaacttactacgttctagcagaatttatcaatgaaggaaatgatttctataagagggcaaagactgttcaggatgcatttatgaaaggtgatcctaaagaaattctttccaatgctaaggtaccggaaaggtgtagtaggctttgtaaagaatttctcagaatatttggagagaaaaaggttccagagattatagatgaactcataagaatcttcggaacccagaaaaaagaaggagaagttgtattctttgatgcaatacccatagctgaagagatagcagataagccgatcttggagttagacataatgaatcctcactatgggccgtattatcaaagtggagagaaaaatgtcccacctcctggggactggtatgatcccatcccaatattcttcctcacagtaccaaaggatgtccccttcctagttgccgttggtggcagagatagagaacttacagaaaaggcctttagcctcgttaagttggcccttagagaccttggtgttggtgcaaaaacttctcttggctatgggaggcttgttgaatatgtttag

SEQ ID NO: 895 - protein, 340 aa, Pyrococcus furiosus
MKEVVKLVLLGERQNSLNLSLYFNKYPPTIIYPEVLEDRNKKLASPSGSQRKISLLVLNQGVLQFNKIKETIEKSLPIETKVKLPQKAYELYKKYYQDYTDMLNSLHAITGKFKTQSRLVVGLGDESVYETSIRLLRNYGVPYIPGSAIKGVTRHLTYYVLAEFINEGNDFYKRAKTVQDAFMKGDPKEILSNAKVPERCSRLCKEFLRIFGEKKVPEIIDELIRIFGTQKKEGEVVFFDAIPIAEEIADKPILELDIMNPHYGPYYQSGEKNVPPPGDWYDPIPIFFLTVPKDVPFLVAVGGRDRELTEKAFSLVKLALRDLGVGAKTSLGYGRLVEYV

SEQ ID NO: 896 - DNA, 510 bp, Pyrococcus furiosus
atggaggtacacatgctaagtaaagataacaagaaaagcataagaaaaactctagaacagcggaggggcgagtatgcttactatgtgataaaagaagtggcagatcttaatgacaagcaacttgaggaaaagtatgcctccctagttaagaaagccccagtcatgatattgtccaatggtctccttcagacgcttgcatttttacttgcaaaggccgagacttcaccagaaaaagctaatcagatcttgagtagagtcaatgaatacccacctaggttcatcgaaaagcttgggaatgacaaagacgagcaccttctcctgtaccttcacatagtctactggttgagggaaaatgtagacagaaacatcgatgtgaaaactctattatcccaggattattcaaaagttctgtgggcaacaaaagaagcaatagcgctcctgaactggatgaggagattcgctgttgcaatgctcaaggaagaggggaaagagaatgaaggaagtagttaa

SEQ ID NO: 897 - protein, 169 aa, Pyrococcus furiosus
MEVHMLSKDNKKSIRKTLEQRRGEYAYYVIKEVADLNDKQLEEKYASLVKKAPVMILSNGLLQTLAFLLAKAETSPEKANQILSRVNEYPPRFIEKLGNDKDEHLLLYLHIVYWLRENVDRNIDVKTLLSQDYSKVLWATKEAIALLNWMRRFAVAMLKEEGKENEGSS

SEQ ID NO: 898 - DNA, 888 bp, Pyrococcus furiosus
atgaaggcatatttagttgggttatataccttaactccaacccacccgggaagtggaactgagcttggagtggtagaccaaccaattcagagagaaagacacacaggatttccagtaatttggggccagagtctcaagggtgtattaaggagctaccttaaattggtagaaaaggttgatgaggagaagataaacaaaatatttggcccaccgacagaaaaagctcatgagcaggctgggctaataagtgtcggagatgcaaagatactattcttccctgttagaagtctaaaaggtgtttacgcatacgtaacttctccactagttcttaacaggttcaaaagagacttagagctagctggggttaagaattttcagacagaaattcccgagttaacagataccgcaattgcaagtgaagaaattacagttgataacaaggtgattcttgaagaatttgcaattctcattcaaaaggatgacaaaggaattttggaaagtgtagttaaagctattgaacaagcctttggaaatgaaatggcagagaaaataaagggtagaattgccataatcccagatgacgtgtttagagatttagtggagctgtcgacagaaatagtagctaggataagaattaatgctgagacaggaactgtagaaactggaggactgtggtatgaggagtatattccttcggacacattgttctactcactaatacttgtaactcccagggcaaaggataatgatatggccctaatcaaagaagttctaggaaagattaacggcaaatatctccagattggaggtaatgaaaccgttgggaagggcttcgtcaaagttactcttaaagaggtgaccaacaatggaggtacacatgctaagtaa

SEQ ID NO: 899 - protein, 295 aa, Pyrococcus furiosus
MKAYLVGLYTLTPTHPGSGTELGVVDQPIQRERHTGFPVIWGQSLKGVLRSYLKLVEKVDEEKINKIFGPPTEKAHEQAGLISVGDAKILFFPVRSLKGVYAYVTSPLVLNRFKRDLELAGVKNFQTEIPELTDTAIASEEITVDNKVILEEFAILIQKDDKGILESVVKAIEQAFGNEMAEKIKGRIAIIPDDVFRDLVELSTEIVARIRINAETGTVETGGLWYEEYIPSDTLFYSLILVTPRAKDNDMALIKEVLGKINGKYLQIGGNETVGKGFVKVTLKEVTNNGGTHAK

SEQ ID NO: 900 - DNA, 1437 bp, Pyrococcus furiosus
atgagagttttggtaactacatggggtaatcccttccagtgggaaccaataacatatgaatacagaggaatcaaagttaaaagcagaaataccttgccaattctagtcaagactcttgagccagagaggattctaatccttgtggctgatacaatggccaactactatgattcaggaaaaaataagccagaaatagaagaaaaatcgttttcgtcttattcggaagttgtggaagatacaaaagaaaggatactatggcacataaaagaggaggtcattgaagaactccgtgaggaagatcctgagcttgctaagaaaattgagaatatgttaaaagatgaaagaattacaattgaagttcttcccggcgttggagtctttggcaacattacagtagagggagaaatgcttgacttctattattatgccacatacaagttggccgaatggttgccagttcagaacaatttagaggtttacttagacctaactcatgggataaatttcatgcccacctttacttacagagccctaagaaacttgcttggattgttggcctacttgtacaatgtaaagtttgagatagttaattcagaaccttatcccctgggggtttcacaagaaataagggaggacacaattctccatattagggaaattggagagggagtagttcgtcctagaccacagtattctccagtagaaggaaagctttactggaatgcatttataagctctgtagccaatggcttcccgttagtctttgccagcttttatccaaatattcgggacgtagaagattaccttaacaaaaagcttgaggaattcctggtgggaattgaggttggggagagagaagatggaaaaccttatgttaaaagagagaaagctcttgacaggagctttaagaatgcttctaagctctactatgctttaagagtgttcaatacaaaattccaaaactatccaaaaaaagaagttcctattgaagaaataatggagatatcaaagatattcgagtctcttcccaggattggaattattttagagaggcaagtagagtggctaagaaatttagtatatggaagattatggtatgaaaatggagaacagaaaataaagaagggtcttttagagattatcaaggataagaaggataaaaggaaagaggccgaagctcttaaaaaagggaagacaatatctttagccgaagctgcaaagcttacaagaatattttctccgagtggagaaagaatagagacaatagaatctccaaatgttgttcgtaactttatagcacattctggatttgagtataacattgtctatgtgaaatatgatagactaagtgataggctgtactttttctataaggataaagaaaaagctgcaaatctcgcttatgaagcccttttatataggggtgaaaaagaatga

SEQ ID NO: 901 - protein, 478 aa, Pyrococcus furiosus
MRVLVTTWGNPFQWEPITYEYRGIKVKSRNTLPILVKTLEPERILILVADTMANYYDSGKNKPEIEEKSFSSYSEVVEDTKERILWHIKEEVIEELREEDPELAKKIENMLKDERITIEVLPGVGVFGNITVEGEMLDFYYYATYKLAEWLPVQNNLEVYLDLTHGINFMPTFTYRALRNLLGLLAYLYNVKFEIVNSEPYPLGVSQEIREDTILHIREIGEGVVRPRPQYSPVEGKLYWNAFISSVANGFPLVFASFYPNIRDVEDYLNKKLEEFLVGIEVGEREDGKPYVKREKALDRSFKNASKLYYALRVFNTKFQNYPKKEVPIEEIMEISKIFESLPRIGIILERQVEWLRNLVYGRLWYENGEQKIKKGLLEIIKDKKDKRKEAEALKKGKTISLAEAAKLTRIFSPSGERIETIESPNVVRNFIAHSGFEYNIVYVKYDRLSDRLYFFYKDKEKAANLAYEALLYRGEKE

SEQ ID NO: 902 - DNA, 969 bp, Pyrococcus furiosus
atgattgaggttacttttactccttatgatgtcctcttatttagagaaagtaggccttttgatgcaggaagtgaaagtgtggcaagatcaattattcctcttccccaaacagtcgctggcgctataaggactcttttattctacaaaggcctcaagaattgtgttggagtgggtgaggaggaacccgaatttacgttagttgggattgcaattggaacagagaaaggcagaatttacccccttcccttcaatatcataaaaagcgagaaattctacaaagttgtcaacccaggtagatttttagggaagttaattcttcctccaaaaggaaagtacaagagtggctatgtaactgaaagcatattggaaaagtatttgaagggagaattaaaagaagtagaagaaaataaagtaataaggattgaaaaggaaaaaaggattggcattaagctttctagagagaagaaagtagttgaagagggaatgctatatactgttgaattcctaagaattgagaaaatttacgcttggatagaagacccaggatgcggaatcaaagatattttgtcatcatatgagttcttaacgttaggaggagaaagtagagttgcttttgtggaagtggacgacaaaacacccgatatatttaatagagaattaggatcaacaaagaaagccctcttctatttctcaactcccacaatagggaaagttggagaaatagtacaagaacttgagaaaagattgaatgcaaaaattgatgattatcttcttgtttcctctagacctacagcaatttctgggtgggatatgcatgaaaagaagccaaaaggtactaaatttgcgatacctcctggttcagttctctttgtagagtttaaggaggaagtagaagttcccccctacattaagcttggtaagttaaagaaacttggctatgggcttgctttaggagggatatgggaatga

SEQ ID NO: 903 - protein, 322 aa, Pyrococcus furiosus
MIEVTFTPYDVLLFRESRPFDAGSESVARSIIPLPQTVAGAIRTLLFYKGLKNCVGVGEEEPEFTLVGIAIGTEKGRIYPLPFNIIKSEKFYKVVNPGRFLGKLILPPKGKYKSGYVTESILEKYLKGELKEVEENKVIRIEKEKRIGIKLSREKKVVEEGMLYTVEFLRIEKIYAWIEDPGCGIKDILSSYEFLTLGGESRVAFVEVDDKTPDIFNRELGSTKKALFYFSTPTIGKVGEIVQELEKRLNAKIDDYLLVSSRPTAISGWDMHEKKPKGTKFAIPPGSVLFVEFKEEVEVPPYIKLGKLKKLGYGLALGGIWE

SEQ ID NO: 904 - DNA, 2616 bp, Pyrococcus furiosus
gtggttaacatcaaagagaaactttttgtataccttcatgatccaccagacaaggctctaaaaattgaaaatcatgaggaaaggtcaaaaaagatattaagttctggcaatatccagtactcgagaacggacaaagttaaacaagcagatgcactttcttctaagactcagagatttataattcgaacaaaggaaaataaagagccagtaatagattttttgggtagatcttcaggaaagtacttccatgttggatatcctgtttttatacaccccatatccacagaaattaagaggtatgaaacacttgaaaagtacatagaccttggcaggagtaatagaggggaaagatttgttaacgagtttttggaaagggtttcaaagcttgaaggcgatgttctcaaagaggtctttgaagatgctagtaacaaatttaaaggagaagagagtaaacagtgggcctacatctggcagttttatcccgtaaaactcaaagaaggagtcaaggaatttgccaagtcagagttaaaacttaaagaggaagaagcagaaaagtttgcagaggaatttgttaacctcccagctgatacaagatttccagatcatgcaatttggacccatttagacttaacttccgcattatccgttaaggatcccactttgctcaggatcaaaatagttccagttcaaccttttattgccaattcaagaaagcagttagatctctgggcctccagtcatctcctttcaatgcttatgtataaagctttagaggtgatagtggacaagttcgggccagaacatgtaatctatccatctctaagggatcaacccttcttcttgaagttctacctgggggaaaacataggtgatgaaatcttagttgcaaacttgcctaacaaagcgcttgcaatagtctcaggaaaggaggctgaaaagattgaagaagaaatcaagaaaagaattagggatttcctactccaactgtacagagaagctgttgattgggcagttgaaaatggagtagtaaaagtggatagaagtgaaaaggatagcatgctcaaggaagcatatcttaaaattgtgagggagtacttcaccgtctcgataacctgggtatctctttccgaaaaggaggatatctatcaagtaacagagaacgcgggtctctcggatgaagatgttaagaagtggctaaagtttgcagaaaagaaagaaaatagtagagttctcgagaggattgcaatatacccacttttggtaaagatattggatagcctgggagagagaaaagttacagaagaaaggttcgaaaaaagcgaacaactcaaaggatggaagtgccacgtttgtggtgagaatcttgcaatttttggagacatgtacgatcacgataatcttaagagtttgtggcttgatgaggaaccattatgtcccatgtgtttgataaaaaggtattatccagtgtggattaggagtaaaactggacagaaaataaggtttgagtcggtggtagatgttgcacttctgtacaagaactggaggaagatatttgacgagaagtatggaaaagacctagtctcaaaggctagggaagttagtgaagacttcgtaaaggacaatatgctagtagattcggatctatactattcttcaacctgggaatctggactttctaaaaagctcaaaaataagaaagagattgatgaggaaaaagttaaggaagttgttgacttcttaaatgcggcttataaagaaatcggtaatccaccaaagtactatgctattctagttatggatggcgacgatatggggaaagttatttcaggagaggtgcttggagaaatatcaactagaattcatccaaatattagggattacgttgaaattccagaagcaaaatattactccaccccgcaggttcacgtggctataagccaagcattggctaacttttcgataagggaagttagatccgtagttaaagacgagggattgctaatatacgctggaggggatgatgtcctagcaattttgccagtcgacaaagctttagaagttgcatataagataaggaaagaatttggcaagagctttgaaaatggttctcttctcccaggttggaagttgagtgctggaattttgatagtccattataagcatccattgtatgacgccctagaaaaggcaagagatcttctcaataataaagcaaaaaacgttccaggaaaagatacactagctataggcctacttaagaggagtggttcctactatatctccctagtgggatgggaattaattagggtcttctacaactcagagctgaggaaaaagctattggaagagaaaggtggagtgggaaagaggttcatttatcatgtgctcagagaagttgatacttggccaaaagttggaatagacgagatgcttaagtttgaggtgattagacatatcaggggaaggaacaaagaagaaactaaagagctcagagaaaagatctatggagaaataaaggatcttcttgagcatgtaagagggaacaatgaagttgaaaaagttagaggcttattcacatttctaaaaataatcacggacgcggaggtgtttccatga

SEQ ID NO: 905 - protein, 871 aa, Pyrococcus furiosus
MVNIKEKLFVYLHDPPDKALKIENHEERSKKILSSGNIQYSRTDKVKQADALSSKTQRFIIRTKENKEPVIDFLGRSSGKYFHVGYPVFIHPISTEIKRYETLEKYIDLGRSNRGERFVNEFLERVSKLEGDVLKEVFEDASNKFKGEESKQWAYIWQFYPVKLKEGVKEFAKSELKLKEEEAEKFAEEFVNLPADTRFPDHAIWTHLDLTSALSVKDPTLLRIKIVPVQPFIANSRKQLDLWASSHLLSMLMYKALEVIVDKFGPEHVIYPSLRDQPFFLKFYLGENIGDEILVANLPNKALAIVSGKEAEKIEEEIKKRIRDFLLQLYREAVDWAVENGVVKVDRSEKDSMLKEAYLKIVREYFTVSITWVSLSEKEDIYQVTENAGLSDEDVKKWLKFAEKKENSRVLERIAIYPLLVKILDSLGERKVTEERFEKSEQLKGWKCHVCGENLAIFGDMYDHDNLKSLWLDEEPLCPMCLIKRYYPVWIRSKTGQKIRFESVVDVALLYKNWRKIFDEKYGKDLVSKAREVSEDFVKDNMLVDSDLYYSSTWESGLSKKLKNKKEIDEEKVKEVVDFLNAAYKEIGNPPKYYAILVMDGDDMGKVISGEVLGEISTRIHPNIRDYVEIPEAKYYSTPQVHVAISQALANFSIREVRSVVKDEGLLIYAGGDDVLAILPVDKALEVAYKIRKEFGKSFENGSLLPGWKLSAGILIVHYKHPLYDALEKARDLLNNKAKNVPGKDTLAIGLLKRSGSYYISLVGWELIRVFYNSELRKKLLEEKGGVGKRFIYHVLREVDTWPKVGIDEMLKFEVIRHIRGRNKEETKELREKIYGEIKDLLEHVRGNNEVEKVRGLFTFLKIITDAEVFP

SEQ ID NO: 906 - DNA, 1017 bp, Pyrococcus furiosus
atgtttattgaagaatttgaaattgagtccataacctccacgcatttattagaggtgctgaccagagaatacccagaagtgagaagtccttcaataaagggagcaatgagatggtggttcagagctttggctggctcatattttggagacgatgctcaaaaacttaaagaaatagaaaaccaagtttttgggagcacaaaggaaagaagcagagtaaaaatttctgttacaccgcttagttctccaaaaagattaaaccttaaagagtttaaggataaaaatgttgggtacatctggttttcaataaatctgctcggaaaaagagggactataactcactattatcctcctgggagcagatttagagtagttctagaatcacctagcgaaagggttattaagctggcaactttatctctctgggctcttgtgagcttaggtagtgttggatttagaagtagacggggaacaggttcaatgaaaatcgttagggcaagtagcgaagttctggaggatttgggactcacaacagaattcaattctatagatgaatttaaagattctttgaaaagggtgttagatgtcacaggcgaaattttaggagtaaaaaatagcgaaactaataagtccctcccttcttacgctactttaaagttttcagacgttgaagtatttgggccagggaagaatacttgggaggtattagctcagttcaacaactcttacaaggaatacctaaggaggagaattaagaagtatcaaaggataatatttggattgcctcgatttaagcttagaggcgtgaggaaagacctaaggagagcttctcccctttggtttggcgttgtagagataggcggaaagccatatggaaggataatcaagttcttccaatctacatttcatccagaagtaagaagcaaacatatagttgattggaacgttctttcaaattttgattggtttatatcctctagacttcctgtgactaaggtgtggggtggttggagtggttaa

SEQ ID NO: 907 - protein, 338 aa, Pyrococcus furiosus
MFIEEFEIESITSTHLLEVLTREYPEVRSPSIKGAMRWWFRALAGSYFGDDAQKLKEIENQVFGSTKERSRVKISVTPLSSPKRLNLKEFKDKNVGYIWFSINLLGKRGTITHYYPPGSRFRVVLESPSERVIKLATLSLWALVSLGSVGFRSRRGTGSMKIVRASSEVLEDLGLTTEFNSIDEFKDSLKRVLDVTGEILGVKNSETNKSLPSYATLKFSDVEVFGPGKNTWEVLAQFNNSYKEYLRRRIKKYQRIIFGLPRFKLRGVRKDLRRASPLWFGVVEIGGKPYGRIIKFFQSTFHPEVRSKHIVDWNVLSNFDWFISSRLPVTKVWGGWSG

SEQ ID NO: 908 - DNA, 795 bp, Pyrococcus furiosus
atgaggtttttaataagactagttccagaggataaggatagggcatttaaagtaccctacaatcatcaatactacctccagggtttaatatacaacgctattaaatcttccaatccgaagcttgcaacatatctccatgaagttaagggccctaaactctttacgtattcactttttatggccgaaaaaagagaacatcccaaaggcttgccatatttcctaggatataaaaaaggatttttctacttttctacttgcgtccctgagatagctgaggccttggtgaatggattgttaatgaacccagaagttaggctgtgggatgagaggttttatcttcatgaaattaaggttttaagagagcccaagaagttcaacggttcaacctttgtaacgctctccccaatagccgttacagtagtaagaaaaggcaagtcatatgacgttcccccaatggaaaaagagttctactctattataaaagacgacctgcaggataagtacgttatggcctatggagataaacctcccagtgaatttgaaatggaggttttaattgcaaaaccaaagcgatttagaataaaaccggggatttaccagactgcgtggcatttggtgtttagggcttatggaaatgatgacctcctaaaagttggatacgaagtagggttcggagaaaagaattccctgggcttcggaatggttaaggttgagggcaataaaacgacgaaggaggctgaagagcaagaaaagataacattcaacagtagagaggaattaaaaactggagtataa

SEQ ID NO: 909 - protein, 264 aa, Pyrococcus furiosus
MRFLIRLVPEDKDRAFKVPYNHQYYLQGLIYNAIKSSNPKLATYLHEVKGPKLFTYSLFMAEKREHPKGLPYFLGYKKGFFYFSTCVPEIAEALVNGLLMNPEVRLWDERFYLHEIKVLREPKKFNGSTFVTLSPIAVTVVRKGKSYDVPPMEKEFYSIIKDDLQDKYVMAYGDKPPSEFEMEVLIAKPKRFRIKPGIYQTAWHLVFRAYGNDDLLKVGYEVGFGEKNSLGFGMVKVEGNKTTKEAEEQEKITFNSREELKTGV

SEQ ID NO: 910 - DNA, 30 bp, Roseiflexus castenholzii
ccccccttctcccacaaggggcgaaggggg

SEQ ID NO: 911 - DNA, 867 bp, Roseiflexus castenholzii
gtgtcgcgtgaaccgatctattccttcgccgcactgcacaatcgcctgacggtgcgcggtgacctgctggcgctcacggcgctgcgcatcggcgcggggcgggcaactgagatcatcgccaacgacctgccggtgctacgcgatgccttcgaccgacccttcatccccggcgcgtcgctcaaaggcgctctgcgcgcgcaggttgagtccctcgtgcgcgccgtccagcccgatcaggcgttcgacctcgaacaaatcgaagcccatatgcgccgagagatcagccggttgaaagagcagcacgatgatgatatggaactgagcaaagcgatctggcgcgcctcaactctgatcgacctgaccttcggcgcgccgtgggtcgcggggcgggtgttcttcaaggatgcacaggttgaccccaggctctggtttggtcagttcgaaacgcgcaacggcgtcggcatcaaccgcgataccgaaacggctgaacctgggctgctctacgattacgaggtcgttcctgccggcgcgcgcttccattttgatctggtggtcgagaatgcggcgccatggcaactgggtatgctgctggcggcgctcaagccatggcagcgcggcgacgtacagatcggcgggttccgctcgcgcggtttggggtatgtgcaactggtcgggcgtgagggacgcgaagcgccggagattcgttacatggctgtgcgcgaaggcgtggctggtgtcgatgatgtcattgcctggctcaacggcggcggcgaggcagtcggcgccgatcaagagcgggaatgggttgccgcgttccgctcagccctggagcaacctgagcaggcgaaggagatgatcaatgcataa

SEQ ID NO: 912 - protein, 288 aa, Roseiflexus castenholzii
MSREPIYSFAALHNRLTVRGDLLALTALRIGAGRATEIIANDLPVLRDAFDRPFIPGASLKGALRAQVESLVRAVQPDQAFDLEQIEAHMRREISRLKEQHDDDMELSKAIWRASTLIDLTFGAPWVAGRVFFKDAQVDPRLWFGQFETRNGVGINRDTETAEPGLLYDYEVVPAGARFHFDLVVENAAPWQLGMLLAALKPWQRGDVQIGGFRSRGLGYVQLVGREGREAPEIRYMAVREGVAGVDDVIAWLNGGGEAVGADQEREWVAAFRSALEQPEQAKEMINA

SEQ ID NO: 913 - DNA, 465 bp, Roseiflexus castenholzii
atggatcagcagggcagtgatgaactgcgccgcgaactggcgctcgaccaggcgattggcgcgcaactcgacaaactggtgcggcgcgcaaacctggcagtgctgaagttgcgcaacgcgaagatggaagagaaccagttgcgtaatctgctcgacgccgcgatggagtctggctcggttgaggtgactgccgggtttatccgctatcagatcgggcgtgacagtgccaactggaaagacttcgggcatcacgtcatcagcgatcttggcaaactgggacgcgatgagaccgaaaaagtcgttgattctttgaaacacatgagcatcgccgacgccgatgcgctcaagccgcgcatccaggtgcgcctgatgcaactctatcttggatacatcaatcgcgcctttgtgtacgccaaaaaggcgaacggtttcgatcatctaaaggaggtcgtcagtgtcgcgtga

SEQ ID NO: 914 - protein, 154 aa, Roseiflexus castenholzii
MDQQGSDELRRELALDQAIGAQLDKLVRRANLAVLKLRNAKMEENQLRNLLDAAMESGSVEVTAGFIRYQIGRDSANWKDFGHHVISDLGKLGRDETEKVVDSLKHMSIADADALKPRIQVRLMQLYLGYINRAFVYAKKANGFDHLKEVVSVA

SEQ ID NO: 915 - DNA, 1176 bp, Roseiflexus castenholzii
atgcacgagacggtgctgatagtcgaggcgcgtgagccgctcgcctttccggagagcaagccaggtgcgcagttccgccaaagcctgccatttgtgcctggtgcggcgctgtttggcgcgctcggcggcgcgttggatcggagtgggcgcttcgatccggcgctcctgcggcggctgcgctgccgcaatgcctacccgatgcacgaaggcgatgcatgggtgcgcccgttgccggcaaccgccatcacgccaaagggcgagagtcgcctccgcgactcgctggtgccgcgggtgtgctgggaacaacagaccccgcccgcactggtgtacgcgccaactgatgccgaggggcgtccctgggaagcggctggtcagaagttctacaccatcacggatgggaaaccggagtttcgcaacgtcacgcagcgcatccacacgcgcgtggccattaaccggaggcgcggcacggcagaagatagcctgctctattcctttttcgccatcaacgagacaacgctggaaacagacacgccaacgcgtttcatcggcagcctggcgatgatcgatctcgatgacgccgctgtctggcatcagataacggaccttgtcacacagcggattgatcgccttggcgcgcgccagacaaccggcattggcggggtgcggataacactgcgcgatcttccggctgagcgcagcatccgcgagcgcgtggaagcgctgaccaggcgattcatccggcagattgagcgctaccagaatctcggcggcgcaacgtggcgtctttccggtcagatgttcaccgtcaacctggtttccgatgccattctgttgcgcgatggctggctgccaacccaggaactgagcgccgatatgctgcgcgacgccaccggcatcgaggcgcggctcgtgcgctcgtttacgacaacgcggatcgtagcaggatggcacgctctctggcagcgccccaaaacgtcacacattgccgtgcgcttcggcagcctgtacgtgttcgaggcgcagcgctcgctgaccgacgatgattacgccgttctggaacgccttgaacgcgacggcatcggcgagcgtcgccaggaggggttcgggcaagtgcgcatctgcgatgactttcatttgatcgattgggaggaagagaatggatcagcagggcagtga

SEQ ID NO: 916 - protein, 391 aa, Roseiflexus castenholzii
MHETVLIVEAREPLAFPESKPGAQFRQSLPFVPGAALFGALGGALDRSGRFDPALLRRLRCRNAYPMHEGDAWVRPLPATAITPKGESRLRDSLVPRVCWEQQTPPALVYAPTDAEGRPWEAAGQKFYTITDGKPEFRNVTQRIHTRVAINRRRGTAEDSLLYSFFAINETTLETDTPTRFIGSLAMIDLDDAAVWHQITDLVTQRIDRLGARQTTGIGGVRITLRDLPAERSIRERVEALTRRFIRQIERYQNLGGATWRLSGQMFTVNLVSDAILLRDGWLPTQELSADMLRDATGIEARLVRSFTTTRIVAGWHALWQRPKTSHIAVRFGSLYVFEAQRSLTDDDYAVLERLERDGIGERRQEGFGQVRICDDFHLIDWEEENGSAGQ

SEQ ID NO: 917 - DNA, 645 bp, Roseiflexus castenholzii
atggtcaacgtacagtttgatctcgaagttctgagcgacactcccgtgagcgtcggcgcaggcggcagtgccggaacgcttgccgacaaagtgatcgtgcgcgatagccgggggcgtccgcttatccctggctcgcaggtcaaagggcgcacgcgccacgccgctgaagccattgcatccacgcttggactcggcgtgccgcagagtttcggcgacgagaccgataccatcatacggcgcgtgttcggttcgccgcagcaacgagcgccgcttcacttcgccagtctgatcgctgatgtcggaaaggcgcagaccgtaccgcaatggttgagtcagatccgccccagcgtggcgctcaaccggcggcgcggcacggcggaggatgagcgcctgttgtttcaggaaacagcgctgcgcgggatgcgcttcaccgctcgaccggcgattgttggcacgcttcctgacctcggtcatgtcgcgctgctctgggctgcattgcgcgttgttgatcgctggggcagcgcgaagtcgcgtggactgggatgggcgacaacaagagtgcaggtgacagtggccggtcaggtacaggacgatgccgttctcgccaaggcgttgcgcgatctggtgcgcgggggaggagcgtaa

SEQ ID NO: 918 - protein, 214 aa, Roseiflexus castenholzii
MVNVQFDLEVLSDTPVSVGAGGSAGTLADKVIVRDSRGRPLIPGSQVKGRTRHAAEAIASTLGLGVPQSFGDETDTIIRRVFGSPQQRAPLHFASLIADVGKAQTVPQWLSQIRPSVALNRRRGTAEDERLLFQETALRGMRFTARPAIVGTLPDLGHVALLWAALRVVDRWGSAKSRGLGWATTRVQVTVAGQVQDDAVLAKALRDLVRGGGA

SEQ ID NO: 919 - DNA, 2184 bp, Roseiflexus castenholzii
atgatgaacgcagatcgtttcacctttactcgcgcgattgcagcgtgcctggtgtatggaacgggtatcgacgcccgttcagtggaagacgtagtgcgttcggctttggacaacgcgccggtcgcgccgtccaaagccatgctcgaggaattgcacacgacggtgacgacgcgactgcacgacgccggtttgccggaggaagcgcagcgagtggcgctggtctacggcggcgcaacgaagatcaagggatacgtcttcgagtcgccggcgttgcccgaaattcgcggcgccagtgcgctgctcgagtgggtgaatgatcatcatctttctgcgatctggcgtgagacgctcggtgagagtctcggagaatcgtgcattatctatgctggcgggggtagtcttctcgccttcgcgccagttgcgaaaggtgcggaactcgccggtcgcattgaacaggcgtttacccgccagaccctcaccgccaatagcgtcgccgtcgccgcaaccttttcgctcctcgaactgcgctacggacgtcgaccgctcgacttttgggcagacgcctttctggatcgatggcagaacctgcacctgcgaccggaactcgaagcgtactactacgcgccgttgccgggcagcgccgcagcgaatctgagtgatgacgcgatccgtactgccgttccggggcgcgcgctcacagttgatgacataagcgccgtgcgtcgctttctgaaccgcaagcaattcggcgaactggtgacgatcctggcgactatgttcaaccggcgccgcgacgagcgcgcttacgctggcgcgccgcgcgttctaccgctctacccgatgacgccatgggcggaacggtgcgccagcagcgatgtgcgccccgccgaatggcgcgggacagtcgccgatgaaacacgcgcctacagcgaaccttcggcgcgcaaacggtatgtcgggcaactgatcaagcgcgacgacgacgatcagacgcgctggtacacgtcaacgttcgcctggcgcgcacctgacgacctgcgcaatcgctcgtgggaaacacggtgggaagcgtttctggctaaggaaggcgccgctacgccttaccgttgcgccatggatcagcagccgaatgtgacgccgccgcgcgacctgaatgagatcggcgccgcttcccgaccagatcgctacatcggcatcatctacgctgacgggaacaacgtcgggcggttaatcgccaccctgtcgacccccgacgacttgcaccagacttctgcgcatctgagcacagccgcaaccgatgcagtcttcaaagcgctagcgcagtgtctgcgaccggctgaggtgcgacgcaagcggcagcgtgcggttgtgcatcccttcgagattctgactattggcggtgacgatctgctcctcattgtccccggcagtcgcgccttcgacgtggcgctggcgattgcgagtgagtttgaacgctccctggcgcagaacctccctgcgccatccgacgcctgtgcgtcgaatgccattcacacgcgctacatccgcgaaacgctggtcacgcgcgagccgtacacgccgtcggtggggctttcggcaggcgtggtcgttgcacaggagtcggcgccgatcttcttcctgcgtgatctggtggaggaattgctcaaacgcgccaagaaactggcgcgctccttgaccggacaacgctactacggcggcgctgtcgattttatggtgctgaaatcggtcaccatggtcgccgacacggtcgaaacgttccgcaaagcggcgctgcatgatgagagcgatcggcgtctcaccgctcgtccctacacctggcacgagtttgccggtttgctggaaaccgcccgcgcactcaagcgcagccgcttcccgcgctcgcaactctaccgtctgcggcgcgtcatggaaacaacgccaggggtcatgaccagttctctggaatacctctatacccgtgtgcggcagaaggacgccaacaccatgctgatcgaacacatcgaacaggcatggcgccaggcggacgctgcgttgcgtcgtccggcgacgcatccgtggctgttgcgtgccgcaggaggacacgaaaccatctggtccgatctcgccgaaatctacgatatggtctctttgccggagggtgaggatggtcaacgtacagtttga

SEQ ID NO: 920 - protein, 727 aa, Roseiflexus castenholzii
MMNADRFTFTRAIAACLVYGTGIDARSVEDVVRSALDNAPVAPSKAMLEELHTTVTTRLHDAGLPEEAQRVALVYGGATKIKGYVFESPALPEIRGASALLEWVNDHHLSAIWRETLGESLGESCIIYAGGGSLLAFAPVAKGAELAGRIEQAFTRQTLTANSVAVAATFSLLELRYGRRPLDFWADAFLDRWQNLHLRPELEAYYYAPLPGSAAANLSDDAIRTAVPGRALTVDDISAVRRFLNRKQFGELVTILATMFNRRRDERAYAGAPRVLPLYPMTPWAERCASSDVRPAEWRGTVADETRAYSEPSARKRYVGQLIKRDDDDQTRWYTSTFAWRAPDDLRNRSWETRWEAFLAKEGAATPYRCAMDQQPNVTPPRDLNEIGAASRPDRYIGIIYADGNNVGRLIATLSTPDDLHQTSAHLSTAATDAVFKALAQCLRPAEVRRKRQRAVVHPFEILTIGGDDLLLIVPGSRAFDVALAIASEFERSLAQNLPAPSDACASNAIHTRYIRETLVTREPYTPSVGLSAGVVVAQESAPIFFLRDLVEELLKRAKKLARSLTGQRYYGGAVDFMVLKSVTMVADTVETFRKAALHDESDRRLTARPYTWHEFAGLLETARALKRSRFPRSQLYRLRRVMETTPGVMTSSLEYLYTRVRQKDANTMLIEHIEQAWRQADAALRRPATHPWLLRAAGGHETIWSDLAEIYDMVSLPEGEDGQRTV

SEQ ID NO: 921 - DNA, 23 bp, Roseiflexus sp
gggcaaagcccgcctgcgcgggc

SEQ ID NO: 922 - DNA, 870 bp, Roseiflexus sp
gtgtcgcgtgaaccgatctattcatttgcggcggtgcacaaccgtctgacggtgcgcggcgacctgctggcgctgacggcgctgcggatcggcgcgggacgcgcgacggagattatcgctgccgacctgccggtgctgcgcgatgcgctcggcgctccctttattcccggcgcttcgctcaagggcgcgttacgcgcccaggttgaagccgtggtacgcgccattcatcctgatcaggcgtccgatctcgatcaactcgaaacgcgcatgcgccgacagatcagtcaactgaaagagcagcagtcttcagacgacatgacgctcagcaaagcgatctggcgcgtgtccacgctgatcgacctgaccttcggcgcgccctggaccgccggacgggtctttttcaaggatgcccgcgttgatcgcacgctctggttcgggcagttcgagatgcgcaacggtgtcggcatcaaccgcgataccgaaacggttgaacagggattgctgtacgactacgaagtcgttccggctggcgttcgattccatttcgacctggttgtggaaaatgcggcagcctggcaactgggcatgctgctggcggcactcaaaccctggctgcgcggcgacgcgcagatcggcggattccgctcgcgtggactggggtatgtgcaacttgtcgggcgcggcggccgggagcagccggagattcgcttcatcaccgtgcgtgagggcgttgcaggcgtcgatgatgtgctggcgtggctcaacggcggcggcgaaccggtcagcgcacaacaggaacaggagtggatcgcagcattccgtactgtgctggagcgacccgaaacggcaaaggagatgatcgatgcataa

SEQ ID NO: 923 - protein, 289 aa, Roseiflexus sp
MSREPIYSFAAVHNRLTVRGDLLALTALRIGAGRATEIIAADLPVLRDALGAPFIPGASLKGALRAQVEAVVRAIHPDQASDLDQLETRMRRQISQLKEQQSSDDMTLSKAIWRVSTLIDLTFGAPWTAGRVFFKDARVDRTLWFGQFEMRNGVGINRDTETVEQGLLYDYEVVPAGVRFHFDLVVENAAAWQLGMLLAALKPWLRGDAQIGGFRSRGLGYVQLVGRGGREQPEIRFITVREGVAGVDDVLAWLNGGGEPVSAQQEQEWIAAFRTVLERPETAKEMIDA

SEQ ID NO: 924 - DNA, 471 bp, Roseiflexus sp
atggatcaacagagcagtgaagaattgcgccgtgaactggcgcttgagcaggcaatcggcgcgcaactcgaccatctggtgcgtcgcgcaaacagggctgtaatgaagttgcgcgagaagcgtgacaaaatggaggaaagtcagttgcgcaacctgctcgacgctgccatggagtctggctcggtcgaggtgactgccgggtttatccgctaccagatcgggcgcgatgataatatctggaaggacttcggccatcacgtgatccgcgatctgggagaactgggaaaacaggagactgagacggtcgtcgcccatctgaagcagatcgggatcaccgatgccgatgcgctcaagccgcgcattcaggtgcgcctgatgcaactctacctggggtatatcaatcgcgccttcgtgtacgccaaaaaggcgaacggcttcgatcatctcaaggaggtcgtcagtgtcgcgtga

SEQ ID NO: 925 - protein, 156 aa, Roseiflexus sp
MDQQSSEELRRELALEQAIGAQLDHLVRRANRAVMKLREKRDKMEESQLRNLLDAAMESGSVEVTAGFIRYQIGRDDNIWKDFGHHVIRDLGELGKQETETVVAHLKQIGITDADALKPRIQVRLMQLYLGYINRAFVYAKKANGFDHLKEVVSVA

SEQ ID NO: 926 - DNA, 1182 bp, Roseiflexus sp
atgagcgaaacgatgctgatcatcgaggcgcgcgaacctctcgctttccccgaaagcaaaccgggaacccagtttcgtaaaagcctgccgttcgtgccgggcgccgtgctctttggcgctatcgggcagacactggcgcataccggtcagttcgatccagaccttctgcgtcggttgcggtgtcgcaacgcctacccgatgcgtgagggggatgcctgggtgcgccccttgcccgcaactgccatccatcccaaaggcgacgatcagcatatgcgcgactcgctggtacagcgggtttgctgggaacggcaacgtccgccagcattgctgtacgcccctgttgatgccgatggacgaccgtgggaaccggctggtcagcagttctatacgatcagggacggcaaactggagaaacgcaccgtcacgcagcgcatccatacccgtgtagccatcaaccgacgacgtggcacggcggaggatagcctgttgtactccttctttgccatcaatgagaccatccccaatacgacgacgccgacccgtttcatcgggagtctggcgctggttgactccggcgatcccgaaacatgggagagggtcaaggcgctgctcagggagcgggttcgtcgtctcggcgcgcgccagaccacgggtattggcggcgtcacacttgaccttgcgccgtctgttcaagaccggaaggtgcgcgaacgggtggaggcgctgaccgaacagttcaaacgacagattgcgcgctaccggcaactcggcggctcattctgggaacccggcgaccgtcaggtgttgaccgtcaacctgatctccgacgccatcctgctgcgcgatgggtggctcccgacccacgaactgagcgcagatatgctccgcgatctgaccggtatcgaggcaacgctcctgcgttccttcacgacgacgcggattgtcgggggatggcaggcgctctggcagcgcccaaagacaacccatgtcgcggtgcggtacggcagtctctacgtctttgaaacggcgcatgcgctgaccgacgagcactatgctgcgctggaacgtctggagcgtgatggcattggcgaacggcgcgcagaaggatttgggcagatccgcatctgtgatgattttcatctgatcgattgggaggggaagcatggatcaacagagcagtga

SEQ ID NO: 927 - protein, 393 aa, Roseiflexus sp
MSETMLIIEAREPLAFPESKPGTQFRKSLPFVPGAVLFGAIGQTLAHTGQFDPDLLRRLRCRNAYPMREGDAWVRPLPATAIHPKGDDQHMRDSLVQRVCWERQRPPALLYAPVDADGRPWEPAGQQFYTIRDGKLEKRTVTQRIHTRVAINRRRGTAEDSLLYSFFAINETIPNTTTPTRFIGSLALVDSGDPETWERVKALLRERVRRLGARQTTGIGGVTLDLAPSVQDRKVRERVEALTEQFKRQIARYRQLGGSFWEPGDRQVLTVNLISDAILLRDGWLPTHELSADMLRDLTGIEATLLRSFTTTRIVGGWQALWQRPKTTHVAVRYGSLYVFETAHALTDEHYAALERLERDGIGERRAEGFGQIRICDDFHLIDWEGKHGSTEQ

SEQ ID NO: 928 - DNA, 654 bp, Roseiflexus sp
atgatcgatgtcgaggtgtctctcgaagttctcagcgaaacaccggtaagcgttggcgccggcgggagcgccggcacgctcgccgataaagtcatcgcgcgcgatagccgcaatcttccgatcattccgggttcgcaggttaagggtcgcacccgccacgcagcagaggcaatcgctcgatcgctcggtcttcctgtgccgcgtggctttgacgacaatgccgacaccgccatccgacgcatttttggttcaccgcagtatcgcgcaccactccatttcgccagtctggtcagtgtcctcggtgaaccgtcgcagatcggaccggagcaacgcctgagccatatccgtcccagcgtggcgatcaatcggcgacgcggcacggcggatgatgagcggttgttgttccaggaaacggcgctggaggggatgatcttcgccgcccgaccggcaattgtcggcgccctgcccgacattgagcatctggcgttgctctgggctgcgctacgcgccgttgatcgctgggggggcgcaaagtcgcgcggactcggttgggcgacaacccgtatgcaggtgatcgtgaacggtcagccgcagcgcgacgatgacctggaagcagcgctgcgcagcctggtgaagaggggagaagggcaatga

SEQ ID NO: 929 - protein, 217 aa, Roseiflexus sp
MIDVEVSLEVLSETPVSVGAGGSAGTLADKVIARDSRNLPIIPGSQVKGRTRHAAEAIARSLGLPVPRGFDDNADTAIRRIFGSPQYRAPLHFASLVSVLGEPSQIGPEQRLSHIRPSVAINRRRGTADDERLLFQETALEGMIFAARPAIVGALPDIEHLALLWAALRAVDRWGGAKSRGLGWATTRMQVIVNGQPQRDDDLEAALRSLVKRGEGQ

SEQ ID NO: 930 - DNA, 2175 bp, Roseiflexus sp
atgaccgatccagatcgtttcacccacaccgtggcacgatgtctgacccatggcacggatgcccgcgtcgatccggtgacagacattgtgcgtcgtgtactcgaggaagcgccgaaggcgccagggcgcgcggcgctggaggaactcaaccgcactgtaacgcaaggtctgcatgcgaacaacctgcaggacgcgaaggttgcgctggtgtacggcggcgcaacaaaaatcaaggggtatgtcttcgaagcgccagcactgccggagattcgtggcgcgagcgcgctgctcgaatgggtgaacgatcagcgcatcgccgccatctggcgcgaccacctgggtgacgatctcggttcatcttcgatcatctatgctggcggcggcagttttctcgcctttgcgccagccgcgaaaggagcggaactcgccagcctgattgagcaagaattcacccgccagacccttactgccaacagtgttgcggtcgccgaaaccttcacgctgctcgaactgcgctatggatgccgaccgctcgatttttgggtggacgattttctgcgtgaatggcgcgatccgcagatgcgtgccgaacttgaggcgtactaccatgcgccggtaccgggcagtatggctgcgcaactcgatgccgacgatattcgtgctgcgttgcctgggcgaacgctcaacgacgcggacatcgaggcagcgcgccgattcttcaaccgtaagcagttcggcgaactggtgacgctcctggcgacaatgttcaaccgtcgccgcgacgaacgcgcctatgctggcggactgcgtttcattccactctatccaatgctgccgtgggcggaacgatgtgacagcagcgatgtgcgtcctgcagagtggggtggaacaattgctggcgaaacgcgcgcctatagcgaaccatcggcgcgcaagcggtatgtcggtcaactgatcaagcgtgatgatgagcgccagacgggatggtttcgatcaacctttgcctggcgcgcacctgatgacctgcggagtcgctcctgggaaacgcaatgggaagactttctcggcgcaaagggcagcaatacgccgtatggtcgcgcactgaagcagcaccgcgagattgttccatcgggcgacctgagcgagattggcgcggcttctcgaccggatcgctacatcggcatgatctacgccgatgggaataatgtcgggcggttgatcgccacgctttcgacccctgatgacctccgtcgaacgtctgagcatctctcggatgccgctacagatgccgtgttcttcgcattggcgcactgccttcaaccggtagaggtacgccgcaaacgggacagagtggttgtgcatcccttcgagatcctgaccatcggcggcgacgatctgctgctcatcgtccccggtgatcgcgcgtttgatgttgcgcaacggattgcgcacacgttcgagcaatcgctggcgcagcgcatcccggcgccgcctggcgcatgcgcgtccaacgcgatccatacccggtatgctggcgagaccctgttcacaatcgagccgtataccccttcgattggattatcggctggcatcgttattgcgcaagagtcggcaccgatcttcttcctgcgcgatctggtggaagagttgctcaagcgagccaagaaactggcgcgacgctatgccggacagcactactacggcggcgctattgatttcatggtgctgaagtcaatcacgatggtcaccgactctatcgaagcgttccgcgcagcggcattcaatgacgactttccggctctgagaggtccgcgccgtctcaccgcacgtccgtacacctggcacgagtttgccggtttgctggaaacgacacgggcgctcaaacgcggcaacttcccgcgatcccaactctaccgcctgagccgtatgatggagacaacccccggcgtgatcgccagcacgatggaatatctgtatacccgtgtgcgtcagaacgaacaggtgcacacgatgctgatgaagcacattgagaatgcatggcgatcaacagatccgttgcaacgttcgacagcgccgccgtggttgccgacaagcaaaaatgcttatgaaacgatctggtctgatctcgccgaaatgtacgatatggtccccgcgacgctggaggaatgctcatga

SEQ ID NO: 931 - protein, 724 aa, Roseiflexus sp
MTDPDRFTHTVARCLTHGTDARVDPVTDIVRRVLEEAPKAPGRAALEELNRTVTQGLHANNLQDAKVALVYGGATKIKGYVFEAPALPEIRGASALLEWVNDQRIAAIWRDHLGDDLGSSSIIYAGGGSFLAFAPAAKGAELASLIEQEFTRQTLTANSVAVAETFTLLELRYGCRPLDFWVDDFLREWRDPQMRAELEAYYHAPVPGSMAAQLDADDIRAALPGRTLNDADIEAARRFFNRKQFGELVTLLATMFNRRRDERAYAGGLRFIPLYPMLPWAERCDSSDVRPAEWGGTIAGETRAYSEPSARKRYVGQLIKRDDERQTGWFRSTFAWRAPDDLRSRSWETQWEDFLGAKGSNTPYGRALKQHREIVPSGDLSEIGAASRPDRYIGMIYADGNNVGRLIATLSTPDDLRRTSEHLSDAATDAVFFALAHCLQPVEVRRKRDRVVVHPFEILTIGGDDLLLIVPGDRAFDVAQRIAHTFEQSLAQRIPAPPGACASNAIHTRYAGETLFTIEPYTPSIGLSAGIVIAQESAPIFFLRDLVEELLKRAKKLARRYAGQHYYGGAIDFMVLKSITMVTDSIEAFRAAAFNDDFPALRGPRRLTARPYTWHEFAGLLETTRALKRGNFPRSQLYRLSRMMETTPGVIASTMEYLYTRVRQNEQVHTMLMKHIENAWRSTDPLQRSTAPPWLPTSKNAYETIWSDLAEMYDMVPATLEECS

SEQ ID NO: 932 - DNA, 30 bp, Roseiflexus sp
aagcccccctgcacggaacgcgaactccaa

SEQ ID NO: 933 - DNA, 1209 bp, Roseiflexus sp
atgtggttgaaaatcaaacctgaagagcccttgatcatcggtgaggtacgggctggttcgcagtttcttacgagccttccctttatccctggtcgcctgctgcgaggctcctgggttgagcgacttctaattcagggcgaaacggagatcctgcccaaagtgcaatcaattcggataggtaatttctttcctaccacagaatggcggagtatgggctatgcgcttcctctgccgcttactgctctgacatgcaaacgggaaggaggatttcacagcgaaacttacccccagcggcgcggtcatgggattgttgacactctcttgcctcacctggcatatgttctgttgcaggaacgtggtgccctctttgcagcgccctttggcatcacgtgtctcacatgtggaagccgcatggaaccggtatcgagtttttataccgtgtaccagaacggcggccgatctcactatgttcgtacgcgcttacaatatcatgctcagacgaaggtgtccttgagccgccaccgccgcgcttcgaccgaagggatgctctataccgcctctgcgctcagccctcggtcgtcaagtcctgacggttcagccaatgaggctcctttggtctttctggggcgggtatacggcgatgagaaagcggtaaatgacctgtgccgggccgtgaacggcgcggctatcggtgccctgcacactcgaggctacggacgcatccgggtagaggaagctgaggtccggttgccttctttgcgggagcgggtgaaggccttcaatgagactctgaaaaggctgtgggccgatttgcgcactttgtccgtcaacgatggtgacctcccatcagaaccggaggggctgtacttttccgtagatcttctctctccggccatcttgcgcgatcctgttggagtgcccaccctggttctctcgctgagtctcaacggccaagcacttacaccgatctggtatcaggcccggcccgatttcgccggggggtgggctgaaacctggggattgcccaagtctacaaatctggccgtccgcatgggtagcgtctatgtcttccgctggaacggcgggttggaggaattgattgccgctctggattcgatggagactcagggcatcggtgaacgttgcgacgagagtttcggcgaatgtctgatctgtcatccatttcatcaggagatacaggaaagatga

SEQ ID NO: 934 - protein, 402 aa, Roseiflexus sp
MWLKIKPEEPLIIGEVRAGSQFLTSLPFIPGRLLRGSWVERLLIQGETEILPKVQSIRIGNFFPTTEWRSMGYALPLPLTALTCKREGGFHSETYPQRRGHGIVDTLLPHLAYVLLQERGALFAAPFGITCLTCGSRMEPVSSFYTVYQNGGRSHYVRTRLQYHAQTKVSLSRHRRASTEGMLYTASALSPRSSSPDGSANEAPLVFLGRVYGDEKAVNDLCRAVNGAAIGALHTRGYGRIRVEEAEVRLPSLRERVKAFNETLKRLWADLRTLSVNDGDLPSEPEGLYFSVDLLSPAILRDPVGVPTLVLSLSLNGQALTPIWYQARPDFAGGWAETWGLPKSTNLAVRMGSVYVFRWNGGLEELIAALDSMETQGIGERCDESFGECLICHPFHQEIQER

SEQ ID NO: 935 - DNA, 381 bp, Roseiflexus sp
atgctaccccctcgtattcgccacgcaattgaaaagcaagatgatgagctggtacagatggctcacgagctaaccaagagtctaagtggtgacaagagacgccaactgcgcaacatccaggacgttgccgagagcagcgactcctggaaggcactggaactcttcatccgctatcaggctgctcgtggcgaaatagacaaggcgtgggccgaaagcgcgattcaacatctgggggatctccagaggaaagcaaaaggtttggtcactcaggtggctggagtagatgccggggccgtccatctggctctggtttctcgggttctgggttatgctgtgcgctggcatacctgggacacgaaaggcagggaggtaacccgatga

SEQ ID NO: 936 - protein, 126 aa, Roseiflexus sp
MLPPRIRHAIEKQDDELVQMAHELTKSLSGDKRRQLRNIQDVAESSDSWKALELFIRYQAARGEIDKAWAESAIQHLGDLQRKAKGLVTQVAGVDAGAVHLALVSRVLGYAVRWHTWDTKGREVTR

SEQ ID NO: 937 - DNA, 804 bp, Roseiflexus sp
atgagcatttttgacacgtttcgcagccgcctgcaagtgcaggctacactcgaaatgcagacagcgctctctgtaggggctcgcctctccctggaaccgacgggtaccgatttgccggtggtgaaaagccctgatggcctgcccttcattcccggttcgtccatcaagggcgctgtgcgaacccaggcggagcggattctgcgcacggttaaccgcaggccggacctgtgggcctgtgaccctttcgccgatccttgtgtgtcgggcggtcgcaaagcagaactctggcagcaggccgagcagcaaaaccgccagcaagccgacattatctttgctgaatcggtctggaaagaaagttgtaccgcctgccgcctcttcggttctccctggtttgccggtcggctggccttcaaggatgcctatttggtcaacgccgatgacttgcccgtggtcacccagattcgggacggtgtgggtattgatagggacctgggggccgctcgctcaaacatcaagtacgactttgaaacggtagtacccggcgcccgtttcggtgttgagatcttgggtgagaatctggaggactgggaggtgggctttctcctagctgtgctccgcccgtgggaggaaggagcactttccctgggtggcaaagtcacccgcgggccgggctggggagcgctccgcgagattcggctgacccaggtaaaccagcagaatttagtagactacctgattcaggggaaaacccagcctgttgaaccagctccgttcttacaggctttgcaggaacggttgagatag

SEQ ID NO: 938 - protein, 267 aa, Roseiflexus sp
MSIFDTFRSRLQVQATLEMQTALSVGARLSLEPTGTDLPVVKSPDGLPFIPGSSIKGAVRTQAERILRTVNRRPDLWACDPFADPCVSGGRKAELWQQAEQQNRQQADIIFAESVWKESCTACRLFGSPWFAGRLAFKDAYLVNADDLPVVTQIRDGVGIDRDLGAARSNIKYDFETVVPGARFGVEILGENLEDWEVGFLLAVLRPWEEGALSLGGKVTRGPGWGALREIRLTQVNQQNLVDYLIQGKTQPVEPAPFLQALQERLR

SEQ ID NO: 939 - DNA, 885 bp, Roseiflexus sp
atgcataagacacgctacaacgccttacgcctgactttggagatccgtccacgtggttctctgctcatcaaggcgggcgggctgtcggcggatcccacgctgccggacatgcagttcgtccgtacctaccatcctgaaaagggggagacagtctacatccccggctcttctctgaagggtgtggtacgaggtttcactgaaaaggtgctgcgcacgctcggtcgaacggactcctggcactgggcctgtcctacgtttccggatgagcgagagagttgtgcaaagcgtctggagaaagtagaagacagtgcggtcgtctaccgtcaatcctgtggcgcgtgccggatcttcggccatactcgcctcaagggccgggccgcgttcaccgacctcttgccggctactgaaatcaaaaccgaaatccggtatggagtggccatctcccggctgagccatgccgtggcccaggggccttttgagatggaagttgtagtagatggtgccttcattggacacctcttcctggaaaattacgaactctggcagctaggtcttctggtgttggctctggagagtatgaacaatgggctggttaaggtaggctttggtaagaaccgtgggtttggcgaggtggtggtgaccgttatggaagctcaagtggaggaggctggattccaggacgacccgaatactctgcgaggtcttgctgccttcgttgccaaggaggagcaagatcggtatggtctttatgcaccaattcgattgaacgggttgcccgcacccgctcaaagcctgaacttagggctctatcagcggcgagtatacgatggccaggggtggcaatctattgccagtgtagctatgaatgccttgcaagcaggctag

SEQ ID NO: 940 - protein, 294 aa, Roseiflexus sp
MHKTRYNALRLTLEIRPRGSLLIKAGGLSADPTLPDMQFVRTYHPEKGETVYIPGSSLKGVVRGFTEKVLRTLGRTDSWHWACPTFPDERESCAKRLEKVEDSAVVYRQSCGACRIFGHTRLKGRAAFTDLLPATEIKTEIRYGVAISRLSHAVAQGPFEMEVVVDGAFIGHLFLENYELWQLGLLVLALESMNNGLVKVGFGKNRGFGEVVVTVMEAQVEEAGFQDDPNTLRGLAAFVAKEEQDRYGLYAPIRLNGLPAPAQSLNLGLYQRRVYDGQGWQSIASVAMNALQAG

SEQ ID NO: 941 - DNA, 456 bp, Roseiflexus sp
atggaacgccagcaagtttatgtccattctttgaatggttcaccagacattctgcaaggccagtctgctgtacttggcaatcctctataccactgggttgctgaccctctcacctttcgtatgggtaatggtattcctcaagactggttggagaccggatcgcttttcggacctcaaggcgaactgcgctggtggcgagagggagctgagtatcgaggccttctactcacaaagacgcccgtcgccggattaacccctctctcggaagagtgggagggcgaggaacagatcttcttccttcaatccctggatgaccgccggttacgcccgtccttctcggcttaccctggggtggggcaggaagggtgttggcggggaatggtgtattaccgtgatggaattcctgtttttcttagtcctcgggcactgatacctgggaatggaggcgatcaatga

SEQ ID NO: 942 - protein, 151 aa, Roseiflexus sp
MERQQVYVHSLNGSPDILQGQSAVLGNPLYHWVADPLTFRMGNGIPQDWLETGSLFGPQGELRWWREGAEYRGLLLTKTPVAGLTPLSEEWEGEEQIFFLQSLDDRRLRPSFSAYPGVGQEGCWRGMVYYRDGIPVFLSPRALIPGNGGDQ

SEQ ID NO: 943 - DNA, 993 bp, Roseiflexus sp
atgagcccacagcaacctggacccaaacccttcttctgggtggcgctagataaggcaaagccgccaaaaggaagaccccacctgcacgaacgcttttccggcctgagcgggcggattgtgttccagatagaagtgctttcccagtacctctacgtggggagcggcatcctggaccttttcacgccacctggagagaagctggaatacgcctattatgcttttgcccgacggaatggtcagctagtcattcccggcacagggatcaagggggccgtgcgcggggtgtacgaggcccttacgaactcgtgcgtctcacagcgagggcgtgatgaacgaatgccagggtctcaccaggcctgccagggaatcaaaaaaggagaggaacagcaggcagtgctttgtccggcctgccggctcttcggtgtcacaggctaccgtggtcgggtgcacttcactgatgcaaccccaatagaccagatacagaccacccgcatcaaaatctccgatctatggccgccgcgacagagcaaagggcgcaagttctatcagagcaggcgcttccagagcctggatatgcgacccaaaaagagccaccgctacctggaggtggtgtctaaaggaagccgctttgagaccaccctggtctttgagaacctggaggaggcggaaatgggggccttgttgcacgccttgggcctcggtcctcatcctcagagaccggacgaggtggatcaggcctttcccatcaaactaggaggagcaaaaccgcgttgcctcgggagcgtgcggtttgttccacaggatatctacctggtggatgcaacagaccccctgggctctcttgtccagagaggccgacttctggatggcttgactgcacagctacgccagtggcttaagaatgtgggcagtctgctggatcagaaagcctgggaaagcttccttcaggaagccaaacccaaaaatgagccttgccccaaggaggtgtactga

SEQ ID NO: 944 - protein, 330 aa, Roseiflexus sp
MSPQQPGPKPFFWVALDKAKPPKGRPHLHERFSGLSGRIVFQIEVLSQYLYVGSGILDLFTPPGEKLEYAYYAFARRNGQLVIPGTGIKGAVRGVYEALTNSCVSQRGRDERMPGSHQACQGIKKGEEQQAVLCPACRLFGVTGYRGRVHFTDATPIDQIQTTRIKISDLWPPRQSKGRKFYQSRRFQSLDMRPKKSHRYLEVVSKGSRFETTLVFENLEEAEMGALLHALGLGPHPQRPDEVDQAFPIKLGGAKPRCLGSVRFVPQDIYLVDATDPLGSLVQRGRLLDGLTAQLRQWLKNVGSLLDQKAWESFLQEAKPKNEPCPKEVY

SEQ ID NO: 945 - DNA, 1008 bp, Roseiflexus sp
atgtctaagaaactactcattgcaacgctgggcactgctccagcagtggtgaccgaggccgtggacttgctgacccaacagaactgccgaccggacggtgtcatcttgctcagaaccgaagaccatgatgttcgcgaagcctatgagttgctggcaactcatctccctcaacacgacaacttgacctgggtggagcctgtatccatcggccagtacggagacgtggatacccctgaggcggccgtagagtttatgcaggagacatgccgcattctgaagacctaccgcgatgcaggctaccgacttttcgtgagcattgctggcggccgcaaagcgatgtcggcgcttctggccctggccgtgcagttctacggcgccgaacggctgtttcacatctgggtgccgccgtggttggaggcggagggcgagattgcccaattccgcaatctcccggaagaagatctcatccagaagctacatccgcctctgaatacgatgactccggaggaccgcccacgcctggtagacctgcctttcatcggcctcttcccgtggctggaagatatccgggatgcactgaaaggtgtagtttcccctgaacgctccttaaagactctgttgcaagccaataatttgttggactctcaggcaaggcctaccaagctgggaactgccgttttgactattctggaaggcgtggaggggttacccccagcacgtcaggaagagtgcaaaattgctatcgccaaacatcacgaccgcgatcgcctggagcgctttgcgcgggaactctgtagccgctttccctttatcactcagactcaaagcggcgagtggcgctccggtgaggcgaaggtcaaggcggagtcacccaatcgcctaagggtttttgagtctttgggcaaggattttcagatgcaactgatcctggaaacgacggccaccacctctggccaactggaagctgccagacgagccgtagagcgctacctggagcgaaggaggtag

SEQ ID NO: 946 - protein, 335 aa, Roseiflexus sp
MSKKLLIATLGTAPAVVTEAVDLLTQQNCRPDGVILLRTEDHDVREAYELLATHLPQHDNLTWVEPVSIGQYGDVDTPEAAVEFMQETCRILKTYRDAGYRLFVSIAGGRKAMSALLALAVQFYGAERLFHIWVPPWLEAEGEIAQFRNLPEEDLIQKLHPPLNTMTPEDRPRLVDLPFIGLFPWLEDIRDALKGVVSPERSLKTLLQANNLLDSQARPTKLGTAVLTILEGVEGLPPARQEECKIAIAKHHDRDRLERFARELCSRFPFITQTQSGEWRSGEAKVKAESPNRLRVFESLGKDFQMQLILETTATTSGQLEAARRAVERYLERRR

SEQ ID NO: 947 - DNA, 37 bp, Roseiflexus sp
gaagcgaccactgccccgcaatgaaggggattgaaac

SEQ ID NO: 948 - DNA, 993 bp, Roseiflexus sp
atggcgatctacaagcgacgacgttatctcttaatgacccttgatccggtgcacattggcgctggcagctaccgcctggggcgtgtggacaacagcatcgtgcgcgagccgggcacacgggtgccgaaaatccccggtaccagtctccacggcgcggctcgctcttacgctgcccaactgtatgaaacgcccgaagctgctggtcaaacgcacgacacggtgaccaatcctgagcagaatccagtgtgttatacctttggctacatcaagaaaagcaataacggacaagacgtcaaagcctactctggcgtggtcaacgtcttcgacgcgcacatcgtgctcttcccggtgcattcgctggttggaccggtgtgggtcggcacggtcgagcggttgcgtgaggcaggttttgaaatgagcaacgtgcccgatgggtgggcaaaggaggtggcactgttaacatttgcgcgccgagatccgctcaacctgggatggttgatgctcaacaggggcgggcaggtcaccgtgaatgcgccgactaactggcagaccgatcgctggaacgcgattgagaacaagatcgcattggtacatgagtccatcttcagccacatcgtcaacagcaacctcgaagtgcgcacctcggtgagtatcaaccccgaaaccggcgctgccgaggataaggcgctcttcacttatgaagccatcccccgcgccacgtttctaaccgctgaagtggtgctggatgactatcgagcgaaattcgaatcagtttcgcaaaataaaaactctctacccagcaatgccgtctggcaatcgccgctcgatgtgctcgatgccggtctgcgtctgatcgagtggctgggcgttggcggtatgggcacacgcggcttcggacggatcgccattgtcggtcagcctcaggaagaggattatggtcagcagtccaatgctgcgcagtcaccatccggtgaaggagcgacaacgccgtaa

SEQ ID NO: 949 - protein, 330 aa, Roseiflexus sp
MAIYKRRRYLLMTLDPVHIGAGSYRLGRVDNSIVREPGTRVPKIPGTSLHGAARSYAAQLYETPEAAGQTHDTVTNPEQNPVCYTFGYIKKSNNGQDVKAYSGVVNVFDAHIVLFPVHSLVGPVWVGTVERLREAGFEMSNVPDGWAKEVALLTFARRDPLNLGWLMLNRGGQVTVNAPTNWQTDRWNAIENKIALVHESIFSHIVNSNLEVRTSVSINPETGAAEDKALFTYEAIPRATFLTAEVVLDDYRAKFESVSQNKNSLPSNAVWQSPLDVLDAGLRLIEWLGVGGMGTRGFGRIAIVGQPQEEDYGQQSNAAQSPSGEGATTP

SEQ ID NO: 950 - DNA, 2832 bp, Roseiflexus sp
atgagctacgatttgaacaaattggttacagcacaggataatctgctactggcagaggtagcagcatgggtgcatgactggcagaaatgtatcgatatgaaggtcgcctccgattggaacaacaatccaaatgtaaacaaagtaaaaattcgcaattggcagcaaagaggtacaacactaaagccaggggattttgcggatgttctggaaaaactcgttccgaatctctgtgtttcggggaataatatcaaagaaatcgccgagctaggacgacaaccatcccaggcgagaagctcgtcaaaccatctcatccgagtcttgggacaatcacatgatgttagtcatgttgagaaagaacttggtgatcatgagtcaaaagatcaagctacagattggattgcttccccgtttgggtgggaacctatccagcctgacaacttactgaagcggcttctaggagagccaaaaacgcttttgaaaaacttcagtgccatcgcacggaaaaaaattctcgtctcactccaaagtgtcttcgcagaggcatggggcgacactcgccgcccgatcaatgaagtcacactgtgggactggtcttcgattgttgctgcgctctacaaggctgaactggctcgatgtgtgcttaccacccaacaacgcagtccttcagatgttgcctggcgtttactgagtattcgtgttgacggactgcaatacctactttcagtctcacgtattcccgacttgctggcgcgtcgcgagttgctaagcgatgcgtggaaccgagtgcaaacgctgattgaagaaacctacccgctagggttggaggtgtatcgcgacgagaatggaccggtcttcgtcgtgccagacattgagaacctgctggatgaatcccaagttgctcaagatggtggagagagaaagaccctgagagatcttattcgagatgcatttgctgccggaacagtaaagaatgattcatctctcgccatacggcacgaacgtgtgcctgaactctatctggatgacaagccgtggaagggtcagccggctccacaggagttgccaccgattgtgaaccatctcaaacgggacatacgcgaaactactgaccctcaatggctcgaaacactctggcgtggtcagaatgccgaagtatgcactgtctgcggtctgcgtccgcaaggacccgatcccaaagcgcaggagcgcaaggtctgtgatacatgcgaacagcgacgtactgatcgagcgcagcagtgggtaggcacgctgcgttgtggtgatcatccgactatctggattgatgacctgactgatatccatggtcgctatgcgctcatcgtcggtgcgttcgatctaagcggctggctcgcgggtgatctggtgcgcaccctggttgttcgtcaaccagataacaagaatcgtaccactgacaaggtttccaaaaatccctccttcgcccgtctgcgccgaatctgggaaacgacgtacgcattctggcaacaggtcggatcgacagagccgggcatgttgtcagacgcggtgattggtcgcgtggtggggcgcgccgaaccacggttggagattaagtgtagcctgaacgttcagacattggtgccctatcatacgtatgaactggtgctacctgaaggtatcaggctcagcgtgttgtgggatgggaacggttttgtcacctgcgacaatctgacatacctgaacggtcttatgcgatcgggaaagattcaggatatcctgaaacaaggtaagacctttctgatcgaagcatctgatgataccggcaagcgtcgtcaattgggaaacatcacgctcagccaggatgcagtgccgattgccaacggctcctttgttcctgccctgcccctcctcgccgaaccacgggtcttcatggcgcttgtaccggcggatagggcgttggaggtgatcagacagatcaaaacaaagtacgaacgcgagatgggcaaggtgcgtaatcgcctgccgctgcacctgggcgtggtgtttgcgccacgccccaccccactgcgcgctgtgcttgacgccgggcgggcgatgctggagcgccagacagtggccagcgtgtgggaggtattgtgctgtgcacagaaaatggtaagcaaaggcgactcgctgcccgcgcgcttccagcctgatcaggcgggtcaattcgctgagtggtacgaagtaaccctgcagaaggacgaccagcgcctgacctggcatattccggctttaatgggtgacagtcagaccgaagacctctggtacccttacgtctttctggacgatcaggtagaaccgacgacgcgcaaacggtatttcaagagtcgcaatccgtggaagggttgcgatggctggctggttcacgccgctgagttgcaggtcggcgatcaggtatggttcgcgccagcaacgttcgattttgagttccttgatacaaccactcgccgcttcgagattcactacgacactaatggacgacgagcaaaccgacacacccgaccgttttacctcgacgacctggagcggttcgataggctctgggaggtgttcctacgcctgagcaccactcagcgccatcaggtggtgcgcatgatcgaggcgactcgtgaggaatggtttgggcaggatcatggtggcacgtcggtcaccgatcaggtgttcaggcaatttgtgcatgacacgctggctggcgctgaatgggattggaaggcgctgtcgcagaacatccgtgcccagcttgtcgctgctggaacaaaaggggagctggccgatctgctcgaactgcggatggagattctgaaggaggaatga

SEQ ID NO: 951 - protein, 943 aa, Roseiflexus sp
MSYDLNKLVTAQDNLLLAEVAAWVHDWQKCIDMKVASDWNNNPNVNKVKIRNWQQRGTTLKPGDFADVLEKLVPNLCVSGNNIKEIAELGRQPSQARSSSNHLIRVLGQSHDVSHVEKELGDHESKDQATDWIASPFGWEPIQPDNLLKRLLGEPKTLLKNFSAIARKKILVSLQSVFAEAWGDTRRPINEVTLWDWSSIVAALYKAELARCVLTTQQRSPSDVAWRLLSIRVDGLQYLLSVSRIPDLLARRELLSDAWNRVQTLIEETYPLGLEVYRDENGPVFVVPDIENLLDESQVAQDGGERKTLRDLIRDAFAAGTVKNDSSLAIRHERVPELYLDDKPWKGQPAPQELPPIVNHLKRDIRETTDPQWLETLWRGQNAEVCTVCGLRPQGPDPKAQERKVCDTCEQRRTDRAQQWVGTLRCGDHPTIWIDDLTDIHGRYALIVGAFDLSGWLAGDLVRTLVVRQPDNKNRTTDKVSKNPSFARLRRIWETTYAFWQQVGSTEPGMLSDAVIGRVVGRAEPRLEIKCSLNVQTLVPYHTYELVLPEGIRLSVLWDGNGFVTCDNLTYLNGLMRSGKIQDILKQGKTFLIEASDDTGKRRQLGNITLSQDAVPIANGSFVPALPLLAEPRVFMALVPADRALEVIRQIKTKYEREMGKVRNRLPLHLGVVFAPRPTPLRAVLDAGRAMLERQTVASVWEVLCCAQKMVSKGDSLPARFQPDQAGQFAEWYEVTLQKDDQRLTWHIPALMGDSQTEDLWYPYVFLDDQVEPTTRKRYFKSRNPWKGCDGWLVHAAELQVGDQVWFAPATFDFEFLDTTTRRFEIHYDTNGRRANRHTRPFYLDDLERFDRLWEVFLRLSTTQRHQVVRMIEATREEWFGQDHGGTSVTDQVFRQFVHDTLAGAEWDWKALSQNIRAQLVAAGTKGELADLLELRMEILKEE

SEQ ID NO: 952 - DNA, 996 bp, Roseiflexus sp
atgagttacgaattccatgcttactttccttatgctcttcaagatggcaccgtgcaggcatttgccctgcaatggcttgctggcgagacaccggaactgccgaaacgttggggtgatctgcgcttgctgcgtgacccgaccgcacggctggcagtgctggcgcaggcaatgatcacacctcaactcgaacgcgcgcgcagtggcactcgcacgcaagctggcggttaccgcctgtgggttgagcaggacgcggcagcattccttgcccgccaacgcgctacgatgcagcaactcggtctggaaccgacgctgcccgacctggcaaccctcccgtctggcgcatgggcattgcgtctcaccttcaccctgagcaagccgtatctgagcagagacgaccgtctctttcacctgctggaaaatccggtgaagaaggagtgggtctttgatgttccctacgttgcgccgtcgggatggaaaggcgccctgcgtgccgcgctgcgccagatgcgcgggtataccaccccggaacaggaagcgaacgactcgcagatggtgcggctgttcggcaatatcaggggtgacgaagaggcattttgcgccgggtttgtgcagttcttccccaccttcttcgaccgcctcggtctggaggtgatcaacccgcacgaccgggaaaagggggttggcgcacgtggtccgattttgctggaatgcgtacccgctggcgcacagggtgcgttgatgctgctctatgtgccaaccggcacggcggtcgatgcgcagcagagcgccgacgacctcgtggtcgttgcgcagggcattcaggcgatgctgagcacctatggctttggggcgaagaccagcagcggcttcggcatagccgcagatgacctggtggatggcgagatacgtatcatgacaaagacactttccctgaagggaaaacggctgagtgatctggcagtagaggtagaacattggctgaagaccacgccctaa

SEQ ID NO: 953 - protein, 331 aa, Roseiflexus sp
MSYEFHAYFPYALQDGTVQAFALQWLAGETPELPKRWGDLRLLRDPTARLAVLAQAMITPQLERARSGTRTQAGGYRLWVEQDAAAFLARQRATMQQLGLEPTLPDLATLPSGAWALRLTFTLSKPYLSRDDRLFHLLENPVKKEWVFDVPYVAPSGWKGALRAALRQMRGYTTPEQEANDSQMVRLFGNIRGDEEAFCAGFVQFFPTFFDRLGLEVINPHDREKGVGARGPILLECVPAGAQGALMLLYVPTGTAVDAQQSADDLVVVAQGIQAMLSTYGFGAKTSSGFGIAADDLVDGEIRIMTKTLSLKGKRLSDLAVEVEHWLKTTP

SEQ ID NO: 954 - DNA, 1290 bp, Roseiflexus sp
atgattcgatctctgaccatccatcgctttcgtggtattcgcgagggcgtaatcaaaaacttacgggtattcaacgtcttgatcggtccgaacaatagcggcaagtctgcgctgctggaattgctctacctgggcagcctgagcagacgaacctgccagctcatcaccaaaaccattgatcctcccgttcatgcggcgacaatgcttgtcacacgagattttctatcgtatgcgccaaccgaacggctccgttggcgccatggatatgcattgcgtgagacggattccttcttgatcgatctggacaaagaacagaatctcatcctggagctgcccgatcttccggcaacatacccgttgcatcgatttcgtctggctgccgaagcgccggactggttgcgcaagactgacgtacaacgcaccattctgttttcgctcgtgcaaccagatcatgcaccgccagagtttatcccgccgctcctcgccacccatcgcccagatcttccctatcagcgctggcactatgtctgggatcaacgctgggtgtaccgctggaacgatacccatcccctggatcgactggcgatatgggcggaggctggcgatgggagggcggagcatgtgctcttctttgattttcacactgctcatgcccactttgaaggcgcctttgcgcaacgctgctatcgcacggtgagcaagtgggaagagcgcattgcgcagagcatggcgcgagtattcccggatatggcggggatgcgggtgaatgtgaaaccaaccccgaccggcacgacctggggcggttacctggaacttcctgaccgcaccctgccgcttgagatcgatcagttcggcgatggcgcccgtcatgcgttcaaggtgctggctgccctgattgcactggttgatcgtgccgaacagcaagagccgggattgttcttgtgggaagacccggagttatttatgcaccccgccaccctgggccgattgctcgatgaagttgcccggctggtggcagggaagccggtgcaggttttcatgtctacccaaagcctggaagtcatcgcccatgttacccgtatgctccagcacaacgtcttatcgcccgaacagacgctggcgtttcgcctgaacctgcgtgatggggtgctcagatcatcgtggttcaatcgcgaaaatctggcttcctggcttgaatcgggcctcgatccgcgtgttcttgaagacattgatgcgccgcttcagtttcaactgcgagaggaagttcatgaagatcctagtctttgctga

SEQ ID NO: 955 - protein, 429 aa, Roseiflexus sp
MIRSLTIHRFRGIREGVIKNLRVFNVLIGPNNSGKSALLELLYLGSLSRRTCQLITKTIDPPVHAATMLVTRDFLSYAPTERLRWRHGYALRETDSFLIDLDKEQNLILELPDLPATYPLHRFRLAAEAPDWLRKTDVQRTILFSLVQPDHAPPEFIPPLLATHRPDLPYQRWHYVWDQRWVYRWNDTHPLDRLAIWAEAGDGRAEHVLFFDFHTAHAHFEGAFAQRCYRTVSKWEERIAQSMARVFPDMAGMRVNVKPTPTGTTWGGYLELPDRTLPLEIDQFGDGARHAFKVLAALIALVDRAEQQEPGLFLWEDPELFMHPATLGRLLDEVARLVAGKPVQVFMSTQSLEVIAHVTRMLQHNVLSPEQTLAFRLNLRDGVLRSSWFNRENLASWLESGLDPRVLEDIDAPLQFQLREEVHEDPSLC

SEQ ID NO: 956 - DNA, 1071 bp, Roseiflexus sp
atggatgtgcagatcacaaccctgacccctctctggaccggtggcgtggatgggacgaccgaccggctgcacgaaagcggtctgctcggcagcctgcgctggtggtatgaagcgattgtgcgtgggttgggcggtgaggcatgcgatccgagtcagagcaagtgcaccttcgacgctgagaagtataagcaatccttagccagcactccttcgcaacgcctgcgcgatgctggactgtgcgatgcgtgccaggtctttggcgcgaccggctggcggcgacggtttcgtttgacggtggttgatgatcagactcgaccgatctcggcgggtgatcggttgagtgctcgttcaccgggtcgcacacgggggtggtttttaccgcagagtcgaatgggcgccttcaccttgcgactgaccggcgaccctgaggcagtgcaacgtatcgcggcactgctcctgtttctggaacgctggggcaacctgggtgccagagcacaattggggtatggcgcatttcgcgtagccaatctcatcgatgtgcttgtagaggcgaggaaggtgaattggaatacgactcgagcgccacaacgtcttcgtcctcaccctgattatcctgatttacggcgatttctgttcttccagttcgatttcacgcctgtccagccaggctggtggacagacattccagggataagtcgcgtcagcattcaggtgcaaccattggtacagcgctacagcgtcgtaccagtaacaccggcattgaaaaacgcatggcgctctggtcggcaatggaagctcaatgatgagcggattatttttggcgccagccatcccgaccgccgccggggacggatcgcagcaacgtgggcatatcgtatcgatagcaaacagtggtgtgttcgtgggtgggcatggttgcctgcacaattgcaaacagcaagtacgctgactcagacgttaggtaatgcaacaacctggaatcagacgttgagtgtccagggcacactgatccaacaaacaccgcaaacaattcaggatgtgcagcaactgctacagggagcactgcaatga

SEQ ID NO: 957 - protein, 356 aa, Roseiflexus sp
MDVQITTLTPLWTGGVDGTTDRLHESGLLGSLRWWYEAIVRGLGGEACDPSQSKCTFDAEKYKQSLASTPSQRLRDAGLCDACQVFGATGWRRRFRLTVVDDQTRPISAGDRLSARSPGRTRGWFLPQSRMGAFTLRLTGDPEAVQRIAALLLFLERWGNLGARAQLGYGAFRVANLIDVLVEARKVNWNTTRAPQRLRPHPDYPDLRRFLFFQFDFTPVQPGWWTDIPGISRVSIQVQPLVQRYSVVPVTPALKNAWRSGRQWKLNDERIIFGASHPDRRRGRIAATWAYRIDSKQWCVRGWAWLPAQLQTASTLTQTLGNATTWNQTLSVQGTLIQQTPQTIQDVQQLLQGALQ

SEQ ID NO: 958 - DNA, 30 bp, Rubrobacter xylanophilus
gttttgagcctacctataagggattgaaac

SEQ ID NO: 959 - DNA, 270 bp, Rubrobacter xylanophilus
ttgtacgtgatcatggtctacgacgtgaacgtcaagcgggtggtcaaggtgctcaaggtcggccggaagtacctcgagcacgtccagaactccgtgcttgagggggagctgagccccgcccagtacaagaagctcaagcacgaggtggagaagacgatagaccccgaggaggataccgtacgcttctacctacttcgcaccacgagatacctcaccaccgaggagctcggcctgccctcacgcaatgagccggatagcagcttcctgtag

SEQ ID NO: 960 - protein, 89 aa, Rubrobacter xylanophilus
MYVIMVYDVNVKRVVKVLKVGRKYLEHVQNSVLEGELSPAQYKKLKHEVEKTIDPEEDTVRFYLLRTTRYLTTEELGLPSRNEPDSSFL

SEQ ID NO: 961 - DNA, 996 bp, Rubrobacter xylanophilus
atgaagaggcccgtctacatcttcaacgccggcgagctgcagaggcaacaaaacacgctgcgcttcacgctcgccgacggcaagcgccgcttcgtcccggtggagaccacgggcgagatccacgtcttcggcgaggtctcggtcaacacgaagctcctcgtctttctggcccagaacgccatcccgctccacgtctacaactactatggctactggtcgggctcgtacatgccgcgcgagcagtacgtctcgggctacctcaccctgaagcaggccgagcactacctcgaccacgagatgcgtctcgttctcgcccgcgccttcgtgcgcggggcgatggagaacatggagcgggtgctcggctactacgcccggcgcggcgtggagctggatgggcaactggcggagatcgccggcaagaaggagagcctgccgctcgccctgaccacggaggagcttatggccgtcgagggcgggtgccgggacctctactacggctgctgggacgggatcgtaaagagcgaggagttccgcttcgagaagcgcacccgcaggccaccggcaaacaggatcaacgcgctcgtctccttcggcaacagcctcctctacgtgaccgtcctctcggagatccaccgcacccacctcgacccccgcatcggttttctgcacaccaccaaccagcgccgctacaccctcaacctggacgtggccgaggtcttcaagccgatcatcgtggaccgcgtgatcttctcgctcctgaaccggggcgcgatccaggcgaaacacttccacaagggcaccgagggcgtcttcctgaacgagagcgggcggaaaacgttcatcgaagcctacgagacccgcctgaaggagaccatcaagcacccgaagctcggaaggcctgtttcctaccggcggctcattcgcatggagctctacaagctggagaagcaccttatgggagacgagccctacgagcccttcgtgagccggtggtaa

SEQ ID NO: 962 - protein, 331 aa, Rubrobacter xylanophilus
MKRPVYIFNAGELQRQQNTLRFTLADGKRRFVPVETTGEIHVFGEVSVNTKLLVFLAQNAIPLHVYNYYGYWSGSYMPREQYVSGYLTLKQAEHYLDHEMRLVLARAFVRGAMENMERVLGYYARRGVELDGQLAEIAGKKESLPLALTTEELMAVEGGCRDLYYGCWDGIVKSEEFRFEKRTRRPPANRINALVSFGNSLLYVTVLSEIHRTHLDPRIGFLHTTNQRRYTLNLDVAEVFKPIIVDRVIFSLLNRGAIQAKHFHKGTEGVFLNESGRKTFIEAYETRLKETIKHPKLGRPVSYRRLIRMELYKLEKHLMGDEPYEPFVSRW

SEQ ID NO: 963 - DNA, 1122 bp, Rubrobacter xylanophilus
atgcctgagagggaaaagagcaggctcgtgctcaccacgtgcggcacgagcatccttaccaacgatgtagatcaggaacggcgccgcatgataaaccggctcgccaaccacaaagaagacgagctcaccccggaggaaagggagaggctagaccgccacatagaagagcgctggcagctgcttgtcgatgcttcactcgagcaggtcaaacggatgagcgcggagctgaacggcctgatcaactactacggcggcaacctcacgcctcgaccgggcagacccgacgagcacatcctgctcacgagcgacacctacctcggtcgccgggtcggagacgtcctgaaagagtggctggaggagcgggggtttaatgtccaggtctggtgcccgggcggtcttgccacaaagagccgcgaagacttccgccgggccatggccgagctcatccgccgctgcgagggcgcgctgcccttccgcagagatgctggatatcacgtcgcgttcaaccttaccggcggcttcaagagcgtacagggtttcatgcaggtggtaggcatgttctacgccgacgagatgttctacatcttcgagacgggatcgtcgctgatcaccataccccgcctgccgatcaggctggagaccgaagccatagtccgtgaccacgagcagcccttcaggaggctcggcaacggcgaggtgctgccggtggaagagtgcagggagatacccgaggacttgctctttgaggtcgacagtgacgcaacgctctccgagtggggcgagctcatctggcagaggggcgagaaggccctgtactcggagaagctcctcgagcccctgccgggactccggtacagcccgaacttccgcaagaaggttcagaggctcaaactttccccggacaggctcgcaacgctgaacgaacgactcgacagcctgagccttacggtcaggggaaagaagcccaatctgagcgggctggacttcaagcagctcaggagcaatcccaaaccgccctcgacccacgagtgcgacgtttggtccgacgacgaacggaggttgttcggtcactacgaggggagtaccttcatcgtcgacgacatagagcgcgggctacattga

SEQ ID NO: 964 - protein, 373 aa, Rubrobacter xylanophilus
MPEREKSRLVLTTCGTSILTNDVDQERRRMINRLANHKEDELTPEERERLDRHIEERWQLLVDASLEQVKRMSAELNGLINYYGGNLTPRPGRPDEHILLTSDTYLGRRVGDVLKEWLEERGFNVQVWCPGGLATKSREDFRRAMAELIRRCEGALPFRRDAGYHVAFNLTGGFKSVQGFMQVVGMFYADEMFYIFETGSSLITIPRLPIRLETEAIVRDHEQPFRRLGNGEVLPVEECREIPEDLLFEVDSDATLSEWGELIWQRGEKALYSEKLLEPLPGLRYSPNFRKKVQRLKLSPDRLATLNERLDSLSLTVRGKKPNLSGLDFKQLRSNPKPPSTHECDVWSDDERRLFGHYEGSTFIVDDIERGLH

SEQ ID NO: 965 - DNA, 1218 bp, Rubrobacter xylanophilus
atgatgctgccgctttacaaaaaagccggtgaggcaaagctcgaaggagccggcaacgccgggctctggtacgacaagttctgcaataagtggcgccgtgagccagcgaagcacggaaataaagaagcctggacgctcgaagcattcaaccaagacggcaagaccgtaaaccccaagctcgcctggatcaagaccgtgaccggcggccgcgtcggcgacaggaggcagctcgaagaggcatcggggcgcatcttcgacctgctggagagcaggggcggacacccactcttctacaggctcgagtcggacttcgtgagcgggctggggcgggagcacccggtcgagaacggcttcgcctggcatcccacgttgggtacgccatacctgccgggctcctcggtcaagggcctggtacgtgcgtgggcggagcaatgggcagaccccaaaccgcccaaggaggacatcaaacgcatcttcggcagcgagagcaaggacgacagggacttccgggtgggttccgtcgtcttcctcgacgccctgccggcagagccggtgcggctcaaggcggacgtcatgaccccgcactacgcgccgtactaccagggagaggagccgcccgccgactggcactctcccaacccgatccccttcctcgtcgtcgcgcagggggcgagcttcgtcttcggcgtcctgccgcgcagagccgggcacgccggtgactgcgatacggtgcggggatggctcaaggaggccctggagtggatcggggccggagccaagaccgccgtcggctacgggcgcttcgccgtggacgtgaaagcccaaaagaggctcgagagggagcgaaaggagagaaaagccaggcagagagagctcgaggaggaggaacgccgcaagagagaggtcgaggagcaggcgcggggcaagtcacccctgtaccgcgagatcctccaggccagctccgaagaaaagtggcgtgaagacaagggggcctttgccagagagggcgtcgccgagggatggatggacaggatcgaggcggatccccagcaggacgccgtagagctcttcgacggcttcatgcgccagcactacggggacgtgctcaaggaccccgacgccaagaaggggaagaagggcaggctcaaacacaagccccgcccgcgcgagctggccaagaggtggctcaggatactgcaggagcaaaaggatgcctga

SEQ ID NO: 966 - protein, 405 aa, Rubrobacter xylanophilus
MMLPLYKKAGEAKLEGAGNAGLWYDKFCNKWRREPAKHGNKEAWTLEAFNQDGKTVNPKLAWIKTVTGGRVGDRRQLEEASGRIFDLLESRGGHPLFYRLESDFVSGLGREHPVENGFAWHPTLGTPYLPGSSVKGLVRAWAEQWADPKPPKEDIKRIFGSESKDDRDFRVGSVVFLDALPAEPVRLKADVMTPHYAPYYQGEEPPADWHSPNPIPFLVVAQGASFVFGVLPRRAGHAGDCDTVRGWLKEALEWIGAGAKTAVGYGRFAVDVKAQKRLERERKERKARQRELEEEERRKREVEEQARGKSPLYREILQASSEEKWREDKGAFAREGVAEGWMDRIEADPQQDAVELFDGFMRQHYGDVLKDPDAKKGKKGRLKHKPRPRELAKRWLRILQEQKDA

SEQ ID NO: 967 - DNA, 426 bp, Rubrobacter xylanophilus
atggccgaggagagaaccctggagcagcgccgggcggcgcacgcgctcgcggcgattcaggagctgcagagagccggccgcggcgggtacggcaactacaagagctacgtgagctcgctcccggccaccatcctcaccaacggtctcggccaggcggctgcaactcttcttgccggagcaaagctgaacagcaagaaccgcaatgcagacaatagagcacgcgagaagctctacgatcacctttcaagctggctctgcggaggagacgaggagagcccgtatcagaagaaaggtgatctgctcgagaacatcacccgaaacgatcaggactgctacatccgggcgcaggccgaggcgctcgagtacctctcctggctcaagaggttcgccgaggccttcctcgaaggtagcaaaggggagaaatga

SEQ ID NO: 968 - protein, 141 aa, Rubrobacter xylanophilus
MAEERTLEQRRAAHALAAIQELQRAGRGGYGNYKSYVSSLPATILTNGLGQAAATLLAGAKLNSKNRNADNRAREKLYDHLSSWLCGGDEESPYQKKGDLLENITRNDQDCYIRAQAEALEYLSWLKRFAEAFLEGSKGEK

SEQ ID NO: 969 - DNA, 801 bp, Rubrobacter xylanophilus
atgaaaatgagcatagtcggcatgctggccgagaccttcgtgcaccctggcacggggcaaaacgtcggggcgatagacctcccggtagcccgcgaggcagcaacgggctacccgttcatcacgggctcaagcctcaaaggggccctgctcgacgactacagagagcacgacagcgagggcgcggagcgtatcttcggcaagcaggatagcgcgggcaacctcctcgtctccgacgcccggctcctgctcctgccggtgcgcagcctctcgagcgcctaccggtgggtcacctgcccgcacatcctggagaggctccggcgggacctcaagcgcgggagacgggaagcagccttcgaggttccccgggtagagaacaagagcgcgctcggccacccggggaacggaaggctcttcctggaagagagaagcttcgatgtccaaggcaacgttccggaagacgtcatcggagccgtctcctccctcatcccgcacgaggagacgcgcggacggctcgccgggcagctcaccatcctgagcgacgacgacttctcctggttcgcccgctacggactcgcggtgcaggcgaggaacgtccttgatccgaaaaccaaaaagaccaagcagggcggactctggtacgaggagacactgccgcccgacacgctgatgtatgcggtgctggccgagcgcaacggcggaggcgacatcgaaagggtgagggaaaagataggaacccacctccaggtcgggggcaacgagaccgtgggacagggatggttcgcgctcgggtgggaggcgtga

SEQ ID NO: 970 - protein, 266 aa, Rubrobacter xylanophilus
MKMSIVGMLAETFVHPGTGQNVGAIDLPVAREAATGYPFITGSSLKGALLDDYREHDSEGAERIFGKQDSAGNLLVSDARLLLLPVRSLSSAYRWVTCPHILERLRRDLKRGRREAAFEVPRVENKSALGHPGNGRLFLEERSFDVQGNVPEDVIGAVSSLIPHEETRGRLAGQLTILSDDDFSWFARYGLAVQARNVLDPKTKKTKQGGLWYEETLPPDTLMYAVLAERNGGGDIERVREKIGTHLQVGGNETVGQGWFALGWEA

SEQ ID NO: 971 - DNA, 1083 bp, Rubrobacter xylanophilus
atgaagtactacgggatcgaagcgctcgacaccctcttcttcggcgacgggagccccttcgacgcgggcgagacgggccagattgaggtgacgggcgtcttcccgccgagcccgacgacggtcgtcggtgcgctccgggccgccttcgcccgggagctcggctggaggtgcggcgactggccggagaatgtcaaggcgaagctcggcgacggccagcgcctcggccccctgcgcttcgccggaccgtatgtgacgagaggcggcgagcccctcttccccgccccgctttacctgatgaagagcggggagaggttcaccacccggctcaggccgagggacacgccactcgagacggacatgggcgaggtgaggctgccggaggtcgtccccgtcgaagacgattccgggaaggaggcgaaaggtttcaagccgctcgcagacgcctacctcacgaagagcgggacggagcgggcactccgatgggagctcccgcaggaggaagaggtcgtaaaggtctccgacctctgggagggtgagggtcgcctcggcatccggcgcgaccccgagaagcgcaccacccaggaggacgcgctctacctggcctcccacgtgcgcccgaggaggggcgtcgcgctcgcgatgggcgttgcgggctacgagggaccggcgccggggctcatgaccctcgggggcgagagccggatggcctacctggagccatgtgagatctccctgcccgaagcaccggaactagagcccgacgggggcaggctgcgctacacggtcacgctcctcaccccgatgaggccgcaggacgaaggctggcaaagacccggcgggggcctcgccgggctgcccggagaggtagtctcggcctgcgtcgggaagcccgtcctgatcgggggctgggacacggagcgcaagaggccgctcgacctcgagccgcaccttcccgccggcagcacgtggttcatggagacagaggccggggaggtggacagggtgctcgagatgcacgccgggcacatcggtgcaaagacggagtgggggtacggacagatcctgataggaaggtggagatga

SEQ ID NO: 972 - protein, 360 aa, Rubrobacter xylanophilus
MKYYGIEALDTLFFGDGSPFDAGETGQIEVTGVFPPSPTTVVGALRAAFARELGWRCGDWPENVKAKLGDGQRLGPLRFAGPYVTRGGEPLFPAPLYLMKSGERFTTRLRPRDTPLETDMGEVRLPEVVPVEDDSGKEAKGFKPLADAYLTKSGTERALRWELPQEEEVVKVSDLWEGEGRLGIRRDPEKRTTQEDALYLASHVRPRRGVALAMGVAGYEGPAPGLMTLGGESRMAYLEPCEISLPEAPELEPDGGRLRYTVTLLTPMRPQDEGWQRPGGGLAGLPGEVVSACVGKPVLIGGWDTERKRPLDLEPHLPAGSTWFMETEAGEVDRVLEMHAGHIGAKTEWGYGQILIGRWR

SEQ ID NO: 973 - DNA, 1890 bp, Rubrobacter xylanophilus
atgaaaaagcaatcactccacttcaccctgggtccggtgcagggcttcgtcggacaggcgcggcgcacccgcgacctgtgggcgggctccttcctgctctcctacctcgccgggcaggcgatgaaggcggtactcgaaggtggaggcgaaatcgtctttcccgagatcggcacccgggagaggcccaccgacccgcttctcgccgcgatcctgaagagacccatctctgaaaacccgcgccccgagatcggctcgctccccaaccgcttcaaggccggggtgcaggatggcttcgatccggagcgctgcgaggaggcggtgagggaagcctggaagaggatcgccagcagcgtctgggagcggtacgtcgagccggtagcggcttacggcaagggcacgaaggagatctgggagcggcaggtcgagggcttctgggagatgagctgggtcataggcgaggatcccggagaccgcagcgaccagcgctggctcgatctgcgcaagaactggcgtacccaccatccgccctccgagccgggggacaagtgcaccctgatggggagctggcaggagctctcggggtacgtgagagcgagggagcgcgaggcgcaggacaggttctgggatgagctccgcaagaaagccggcacgctcaacctgggcgagcacgagcggctgtgcgcgatcgccctcatcaagcgcctcttcccggaggtcgcgaaagagaccatcggctgggagctcaacgcgagaacctggccctcgacgccgtacatggcggccgtgccctggatcgaggaggcgcgcaataaaccagaggccaagaagcatctcgagctggtacgctccagcggggcgcgaagctcggccttcggcgagtacaacaccaacctcgcgtgcccgaagaatgagaaggacttcgcccggctcgacggcaacttcttccacagagcggccctcgagaacgagcgggcaaccccggacctctctccccaggaacgaaaaggccttctcgaaaacctgaaggctctcaatgaggccgtggggcacccggcctcgaccttctacgccctcttgctcatggacggcgacaggctcggcagcctgctgcagaacaaggacatcgagcccgagctcatctcccgggccctcgcggagttcactgcggaggtcgaggggatcatcggagatcactgcggcaggacggtctacgccggaggcgacgacgtgctcgcgctcctgccggtcgaccgggcgctacaggccgcggcggagttgcgctgcaggttccgccgcgcgttcggctccgtgttcggcgaccggaggccggtagacaaggatggcaaaaccctcaagacgaccatctccgccgggctcgtctacgccacctacaacacgccgctgcgggcggtgatgcaggaggcgcaccggctgctcgacgaggtcgccaaggacgagaacggccgcgacagcatcgcggcgagcgttctcgccggcagcgggcgcaccgtccagtgggtctcggcctgggacgaggggccgggtgacgagcaaatgatcacgagcaccctgacgggcctcgcagaagacctggaggaggagttcgcgggccgcttcttctacaacgtccgcgagcgtttcgatgttctcaccggcgacggcgataggctcatcgaggatctcgacgcgcaggccctcctcgtcgccgagtacctgaagagccgggagcgcgacggagacaggagggaggccgagaaaaccatagagcggctcctcaaagtatgccgccgccggaagggaggagaggcgcccgacgagggcacgctcgacgtctcgggggcgatgctggtccggtttctcgcgacgaagggacggggggtggagagatga

SEQ ID NO: 974 - protein, 629 aa, Rubrobacter xylanophilus
MKKQSLHFTLGPVQGFVGQARRTRDLWAGSFLLSYLAGQAMKAVLEGGGEIVFPEIGTRERPTDPLLAAILKRPISENPRPEIGSLPNRFKAGVQDGFDPERCEEAVREAWKRIASSVWERYVEPVAAYGKGTKEIWERQVEGFWEMSWVIGEDPGDRSDQRWLDLRKNWRTHHPPSEPGDKCTLMGSWQELSGYVRAREREAQDRFWDELRKKAGTLNLGEHERLCAIALIKRLFPEVAKETIGWELNARTWPSTPYMAAVPWIEEARNKPEAKKHLELVRSSGARSSAFGEYNTNLACPKNEKDFARLDGNFFHRAALENERATPDLSPQERKGLLENLKALNEAVGHPASTFYALLLMDGDRLGSLLQNKDIEPELISRALAEFTAEVEGIIGDHCGRTVYAGGDDVLALLPVDRALQAAAELRCRFRRAFGSVFGDRRPVDKDGKTLKTTISAGLVYATYNTPLRAVMQEAHRLLDEVAKDENGRDSIAASVLAGSGRTVQWVSAWDEGPGDEQMITSTLTGLAEDLEEEFAGRFFYNVRERFDVLTGDGDRLIEDLDAQALLVAEYLKSRERDGDRREAEKTIERLLKVCRRRKGGEAPDEGTLDVSGAMLVRFLATKGRGVER

SEQ ID NO: 975 - DNA, 1143 bp, Rubrobacter xylanophilus
atggagcaaatagaggccacattccgggtcgtcaccccgatgttcatgagcggcgcggatcagtccagagccgagctcaggatgccctccataaagggggccctgcgcttctggtggcgggcgctcgcctggggccgccacggcgacctgaagaagatccgcgaggaagaagcccggctcttcggcagcaccgacgaggggcagtcgaagatcttaataagtgtagctgaagccaacacctctcttctacccgccgggacttcagtaaacagcgggttggcatacctgggctacggcataaccgaatacaggagtcaggccggaacagcaacctcccgggaggccataaaacccgacagcaggttcgtgttgaggattgctcttaaagagggagacaaagctcacaaagattctgtgctcgaagcactctggtttatgagccacttcggtggcctgggctcgcgttcgcggcgagggtttggctcggtcatcgtttcagagatgaaaggggccgagcatcccgagataccttcctcgacgaatgaactcaagaaacaaatagagcgaaagctcaaagggttgggaatcgaacagacgagcctgccagattactccgccttctccagacaaacgagggtggtagtctggccgctacacaccacatcatgggaacaagcgctgagaaaggtgggcgaaaggctcaatgcttaccgctcttcgcgtcaggaaaagaactttcttgatgaccgagatctcatccgcgactatgcatttgaggaatctcgcccagcacaagccccgagaagatcctccttcggtctgccacataactattactttatagatgcaaaaactgccgtcccgatatctggccccagcagagaacgagaccggagagcgagcccgctattcatacacttccaccgcctggcaaacgaagacatggttgccgtcttgagtctaatccccgcacgctttctacccgaaggctcaaaggtgagaatcggaccggcggagaagagagagggtggaagaaaacacatcttggctgaacaaatcaaggccgatcctccaggagacttcgaacctgtagagcagtttctctcaagtctttccggagaagcttcggagatcaaggcatga

SEQ ID NO: 976 - protein, 380 aa, Rubrobacter xylanophilus
MEQIEATFRVVTPMFMSGADQSRAELRMPSIKGALRFWWRALAWGRHGDLKKIREEEARLFGSTDEGQSKILISVAEANTSLLPAGTSVNSGLAYLGYGITEYRSQAGTATSREAIKPDSRFVLRIALKEGDKAHKDSVLEALWFMSHFGGLGSRSRRGFGSVIVSEMKGAEHPEIPSSTNELKKQIERKLKGLGIEQTSLPDYSAFSRQTRVVVWPLHTTSWEQALRKVGERLNAYRSSRQEKNFLDDRDLIRDYAFEESRPAQAPRRSSFGLPHNYYFIDAKTAVPISGPSRERDRRASPLFIHFHRLANEDMVAVLSLIPARFLPEGSKVRIGPAEKREGGRKHILAEQIKADPPGDFEPVEQFLSSLSGEASEIKA

SEQ ID NO: 977 - DNA, 1713 bp, Rubrobacter xylanophilus
ttgaacaagctgatctgcacgctcggcaccggcaggtacgacgaggtcacctacgtcttcggcgaccgggagaagaggaccagcatggccccggtggccgtgggctgctgcgccgccgcgggaggggagctcgagctcgtcgccctgctgacgcagagggccgacgagacccacggggaggagctccgtgccgaggccgaagccctgggctggcgctacagcccggtccgcataccggtcggcagatccgaggaggagctctgggagatcttcgggcgcgtgggcgagcacgtcgaggaaggggacgacctggtgctcgacctcacccatggcttcaggcacataccggccctcctcctcctctccgccgtccagtactacacggtccgcagagaggcggatctgctcggcatctactacggagcctacgaggcgcggatggaggacgaccggcgtccgatcctcgacctcaccccgctgatcgacctgcccgagtggtcctacggggtgaggctgctccgggactaccagctccccggcccgctcggtcggatgctggaggacctccagcgccgctcccaccagcagcgcagggagcagcgtttcacccggctgcaggaggtggcccgtcccctgggcagcctcgaggcgccgctcgtctccggcctgccactggaggcaggtatcgaggcgtccagggtgctggagggtgcgaggaaggccgagggggagctgaaccggctcctcccgatgcaagagccctgggaggagctgaaggcccagctcgaggcatggggcgtatccgaacacgcaaagaccgatgttccgctcaccctagaggagttgcggcgtcaggcgaggctggtcgaggggtacctcgaggtccagaacctgcgggcagccgcgaccctcatgcgcgagatcgcggtctccgcggtcgtactccacgccggggatacggaccgctggctggagctcaaagaacgccaacgggccgagcgtgaactcggggtgcagggcaggatggaagagggaaggagccccggcctcagagaggtcctgcccggagcccggagggagctggcccggctctggaacaggatcacggaccgccgcaacgcgctcgcccatgccgggatgcgagaaaacgtggtgaagttcgatagcgaagatctacgcgagctccatgagaagatcaaagacaacctcgagaaccccaccttctggcagaccagcgtgggcggcgtcggggaggagcggtggctcgtctcgccgctcgggatgtcgcccggggcgctctacaccgcgctcctgaaggagcgcccggaccatctgctggtcatcacgagcagagaggccgaggggaggctggacgagatcctcgcggcagccgggcgccaggatctccgcgtacaccgtctgcacctcggcgacccattcaacggcttcgaggaggccagagagaagggcaaagaggccctgtcacagcacgcccgtctctgggtctcgtcgcgggaggtcgtcgtaaaccgcaccggcggcaccacctgtctcggctgggcggccgagaggctcgaggcggcgctgcgaaaagacctcgggctcaggcccaggaccatagcctgcgtggaccgcaggagcgtcgaggagcagagggagaacccctacgtggagggcgaggtgatcgacataggcgagcaggaagaggagtag

SEQ ID NO: 978 - protein, 570 aa, Rubrobacter xylanophilus
MNKLICTLGTGRYDEVTYVFGDREKRTSMAPVAVGCCAAAGGELELVALLTQRADETHGEELRAEAEALGWRYSPVRIPVGRSEEELWEIFGRVGEHVEEGDDLVLDLTHGFRHIPALLLLSAVQYYTVRREADLLGIYYGAYEARMEDDRRPILDLTPLIDLPEWSYGVRLLRDYQLPGPLGRMLEDLQRRSHQQRREQRFTRLQEVARPLGSLEAPLVSGLPLEAGIEASRVLEGARKAEGELNRLLPMQEPWEELKAQLEAWGVSEHAKTDVPLTLEELRRQARLVEGYLEVQNLRAAATLMREIAVSAVVLHAGDTDRWLELKERQRAERELGVQGRMEEGRSPGLREVLPGARRELARLWNRITDRRNALAHAGMRENVVKFDSEDLRELHEKIKDNLENPTFWQTSVGGVGEERWLVSPLGMSPGALYTALLKERPDHLLVITSREAEGRLDEILAAAGRQDLRVHRLHLGDPFNGFEEAREKGKEALSQHARLWVSSREVVVNRTGGTTCLGWAAERLEAALRKDLGLRPRTIACVDRRSVEEQRENPYVEGEVIDIGEQEEE

SEQ ID NO: 979 - DNA, 489 bp, Rubrobacter xylanophilus
gtgatcaccgggacgctcgtgtggtaccacgcgatctgtccgcggcaggcgtggctgatggcacaccagatggagccggagcgggagttcgagctgctcgccgagggccggctcaaccaacaggagcactacgagcgctcgatgaaggagctctccctgccggggatgaggctcgaccgggtgaggcgcgagggcgggcggatcatcgtctcggaggtcaagaagtccaccagataccttcccgccgcgaggctccagctcggctactacctgctgcgcctcagggaggaaggggtggaggcgtcaggtgagatcctggtccccaaagagcgcttccgcgagggggtcgagctcacacaggaactcgaagagagcgtaagagacgtgttgggagagctggaagggctgctcgaaaggagcctgcctcccccggccgcccgcatcccctactgcaggaagtgcgcatacgcggagttctgctggtcctag

SEQ ID NO: 980 - protein, 162 aa, Rubrobacter xylanophilus
MITGTLVWYHAICPRQAWLMAHQMEPEREFELLAEGRLNQQEHYERSMKELSLPGMRLDRVRREGGRIIVSEVKKSTRYLPAARLQLGYYLLRLREEGVEASGEILVPKERFREGVELTQELEESVRDVLGELEGLLERSLPPPAARIPYCRKCAYAEFCWS

SEQ ID NO: 981 - DNA, 2466 bp, Rubrobacter xylanophilus
atgaggttcctggcccgccccggggagcccctgcgcgaccacctcgccgcggtggccggggcggccgagagaggcgtcctcgacgcgcacgtccccgaccgggagcgtctcgccaccctcgcgcgcctctgcgggctcacccacgacttcggcaagtacacgacgtacttccaggacaggctgcccccgaaaagcctggaaccctcgccgaaggcatacgggcaccacgccttcgtctccgcgctcctcggggcgttcgtgaccagggctcgccacccggaggacggagaggcgcagcttctggtctacctcgcgatccaccgccaccacggaaacctcgtgaccccctcggagatcctgccgcgcgagaagcacctcgaagacgccccccgcttcggcgagctttcggcggggctccgcagggagtacgcagcggccgaagcgcagctcgagaacctgcgcggggagcaccgggagcaggtggtctccgagatggaggagctcggcctcccggaggccaaagagtttatagcgcagaggagatggtgggaggcgctccccgaactccggtccttctaccggcggctgctgcgcgagggtgatcccggggcgacccgccgctactggcggctgctcctgctcttctccgcgctcatcgacgcggacaagcacgtctccgccggggtgccggccgcagagcaagggacgcggatagagcccgccctggtcgaggagcacgtgcgcggcctcaagaggcccgcaggaacgccaacggcacccgcggcccggcggctggcggagatacggcacgaggtccgtgaggaggcggccggcaggacagaggacgcgccgctccgggagctctacccggccgtcctgagcctcaccgccccgaccggctcgggcaagacgctcaccgcgctcgaggtggccctgcggctgagggagcgcgtcgcggaggagctcgggcaccggcccagggtcatctacgccctccccttcgtcaacatcatcgagcagaacgcgggcgtcatcgaggaggtgctgcgccgcagggcgcacctcgcgcagaacctgcccgaccaccttctgaggagccaccacctcgcccccctctcggagggagacgacgaaaacacagaggtcgaagaacggctcctgccggcggaggcgtgggagcaggagatcgtggtcaccaccttcgtctcgctcttcgagagcctggtcaccaaccgcaaccggccgctcaagcggctgcacaacatcgccgggagcgtcgtggtgctcgacgaggtgcagagcatcccctacgagcagtggcgcctggtgggccacgtgctcaccaccctcgtccgcgacctggggtgcaccgtgatccagatgaccgccacccgcccccgcatccttccggaggcaagggagctcctctccgcccccgagcgccacttccgggggctgagcaggacccgcatcatcccccgcccggaggtgaaaacactcgacgacctcgcctccttcgtcgaggagcgccgttccggcggcggctcgctgctcgtggtgctcaacaccatctccgattccgtggagctctaccggaagctcggggagcgcctcggcctccgcggctaccgggagtacggcagagtccctggcccgccggagatcttctacctctcgaccaacataaccccctggcagcgctcgcgccgggtgcggcttctgaagcgttgtctgggacgtggcctgagaccgctcgtcgtctccacccaggtggtcgaggcgggggtggacctggacttcgacgaggtcatccgggaccagggcccgctcgactccatcgtccaggtcgccgggaggtgcaaccggggcggcgcctcccccgagccggcccccgtgcacgtggtcttcctggaggacgggcggggcagggcacgggccgagacggtctacggcagggtgctcccgctcatctcccgggagatgctgcgggaagaagtggaggagcccgagctacacgccctcgtcgagcgctacttcgccgccgtcgaggagagaaagagcgacgacctctcgctcgcctacctcgacgcgctcagggagctcgagttcgaccgcagggaggatgggtccaccaccgtaagccgctaccggcacatccaggaggagcttgagacgcggccggtgctcgtggggatccacggaggggccgagaacgcgatagcccacctcgcaagcctctacagtgagaaagacacggcgagaggacgcctccgcgccgccttccggagggtggcgcccttcaccataaccccgaccacgaaccggctgaggaagaaccttccgccggagcacccggagatcccggagcacttctacctcagccgcgccgaggtcttctccgatgactcgacgttctacgacatggagacgggatacaggtgggaacaagaagcgatgctgctgtga

SEQ ID NO: 982 - protein, 821 aa, Rubrobacter xylanophilus
MRFLARPGEPLRDHLAAVAGAAERGVLDAHVPDRERLATLARLCGLTHDFGKYTTYFQDRLPPKSLEPSPKAYGHHAFVSALLGAFVTRARHPEDGEAQLLVYLAIHRHHGNLVTPSEILPREKHLEDAPRFGELSAGLRREYAAAEAQLENLRGEHREQVVSEMEELGLPEAKEFIAQRRWWEALPELRSFYRRLLREGDPGATRRYWRLLLLFSALIDADKHVSAGVPAAEQGTRIEPALVEEHVRGLKRPAGTPTAPAARRLAEIRHEVREEAAGRTEDAPLRELYPAVLSLTAPTGSGKTLTALEVALRLRERVAEELGHRPRVIYALPFVNIIEQNAGVIEEVLRRRAHLAQNLPDHLLRSHHLAPLSEGDDENTEVEERLLPAEAWEQEIVVTTFVSLFESLVTNRNRPLKRLHNIAGSVVVLDEVQSIPYEQWRLVGHVLTTLVRDLGCTVIQMTATRPRILPEARELLSAPERHFRGLSRTRIIPRPEVKTLDDLASFVEERRSGGGSLLVVLNTISDSVELYRKLGERLGLRGYREYGRVPGPPEIFYLSTNITPWQRSRRVRLLKRCLGRGLRPLVVSTQVVEAGVDLDFDEVIRDQGPLDSIVQVAGRCNRGGASPEPAPVHVVFLEDGRGRARAETVYGRVLPLISREMLREEVEEPELHALVERYFAAVEERKSDDLSLAYLDALRELEFDRREDGSTTVSRYRHIQEELETRPVLVGIHGGAENAIAHLASLYSEKDTARGRLRAAFRRVAPFTITPTTNRLRKNLPPEHPEIPEHFYLSRAEVFSDDSTFYDMETGYRWEQEAMLL

SEQ ID NO: 983 - DNA, 777 bp, Rubrobacter xylanophilus
atggggcagaacccgctgctaatcttcgacctctgcggggcgtacgggatgttccgcaagttctacacgaactcctcctcgctctcctaccccttcccgccccgcaccaccctcgcagggctcatcgccgggatgatgggctgcgagcgcgacagctacgcagaagacctctcgctagagcgctgccagatcgccgtctcggtcatcaccccggtgcgccgggtgatgcagcaggtcaactacgtgatgaccgaggggcacgtctggaccaaaaacaccggcggcttcgacggcagctcgggcccgatacaggtcccggtcgagtgggtcttccccgaggtgggccaccgggagctgcgctaccgggtctacgcgacccacgaggaccggggctggcttaagcggcttgcggagatcctcgagggcggggtccccatctacccgccctacctggggatgagcgagtgcccgggcagggtggagcacgtggcgacgctcgaagggtgggggctggggcacagggaggatgagctccccgtccgcaccgtgctcccctcggaggccgtctcggggccgccgcgcctggaggaaggcgtccagatcgtgaaggagaggatccccctcgccctcgacgagcggcggcggctcatcgccgccgccgacgtcctgtacaaccgcgcgggaccgcacataaccgcccggctgcgggcgccggtcttcgaggccgcctaccccggcgcggaggggggccgggagttcggggtgttcctgcgatga

SEQ ID NO: 984 - protein, 258 aa, Rubrobacter xylanophilus
MGQNPLLIFDLCGAYGMFRKFYTNSSSLSYPFPPRTTLAGLIAGMMGCERDSYAEDLSLERCQIAVSVITPVRRVMQQVNYVMTEGHVWTKNTGGFDGSSGPIQVPVEWVFPEVGHRELRYRVYATHEDRGWLKRLAEILEGGVPIYPPYLGMSECPGRVEHVATLEGWGLGHREDELPVRTVLPSEAVSGPPRLEEGVQIVKERIPLALDERRRLIAAADVLYNRAGPHITARLRAPVFEAAYPGAEGGREFGVFLR

SEQ ID NO: 985 - DNA, 945 bp, Rubrobacter xylanophilus
ttggccatccacgacggcgacatcctctacctctacgacgccaagctcaccaaccccaacggcgacccggacgacgagaaccgcccgcgcatggacgaggccaccgggcgcaacctcgtctccgacgtcaggctcaagcgctacctccgcgactactggctgaacgccggggaggacatctgggtgaggcgcaccgagcaggaggagaccaccagcgcgaagcagcgcatgagcgtgctgctcgaggactacaaccgggagaacggcaccaacctcaacgagcgccaggcgcgccagagccgggagttcaaggactggctgctcgggcggctcagggacgtgaggctcttcggggccacgatgccgatggagaacacctcggtcaccttcaccggcccggtgcagttcagctggggctactcgctcaaccgggtggagataaacaactccgcgaccatctccagccacttcgccggcagggagaacgagtacggcaccttcggcaaagactggcgcgttcactactccctgctcgccttctatggcatcgtcagccgaaaccgcgcccggcacaccaggctcaccgaggacgacctcgcggcgctcgacgacgccctggtaagggccatcccgcaggaggcgacgacccgcagcaagatcgggcagaccccccggctctacctgcgcgtcgagtacgaggacggctcccccctccgcctcggggacctgcgagaagacctctccctcgaccccgcagacggcaagaccccggacaccctgcgcgacatccgggacttcaccataggcttcgaccgggtcctggagcgggtacggacctccgagggcggcatcctgcgcgcccgcctctggacgcacccggagctcggcgacgccttcgagcgccgcctgagaggggtgctcggcgaccggctggagaccctctag

SEQ ID NO: 986 - protein, 314 aa, Rubrobacter xylanophilus
MAIHDGDILYLYDAKLTNPNGDPDDENRPRMDEATGRNLVSDVRLKRYLRDYWLNAGEDIWVRRTEQEETTSAKQRMSVLLEDYNRENGTNLNERQARQSREFKDWLLGRLRDVRLFGATMPMENTSVTFTGPVQFSWGYSLNRVEINNSATISSHFAGRENEYGTFGKDWRVHYSLLAFYGIVSRNRARHTRLTEDDLAALDDALVRAIPQEATTRSKIGQTPRLYLRVEYEDGSPLRLGDLREDLSLDPADGKTPDTLRDIRDFTIGFDRVLERVRTSEGGILRARLWTHPELGDAFERRLRGVLGDRLETL

SEQ ID NO: 987 - DNA, 2013 bp, Rubrobacter xylanophilus
gtgatcgagagcatctaccagatcgggagggccatcctggaggagggcggcgggcgcaggaccgtcctcgagtcgctcgccgatagccctccggcagacggcaagggcaaatcctacatcgcgatcctcaagctagataccgcccgctggaagctgggcgtcgaattgagggagctgggcggggagaagaacaccgccgcccgctacctgtggctcggaaacgcgccggccgcgatggacgaccaggaccggctcaccaccaacaacctcgtctacctcgtctcccagaccatcccgaacctcctgatggaggggaggctcgaccctgcctcagccctctacgggaagctgaagaggctgaaagacgagctctacctggacctcggagagccgagcgagctgggcacaaagggcggcggggcgtaccgccgctaccggtatttctgggatgtgggaaggctcggcatagagggtcccggcctggaagagctgcggcaggaggtcagagaagggctaagaccaggcaacgtcccccagaaggtggcccgggcgttgcagagccacttcaggcaggagatcccggagcgcggcgtgctcttcacgctggagctggacggtgagctcctggtggacgatccggcctaccaggagtatctggagcgctccctgataggacgcgtcttcgagggagcgcgcgaggagggggtctgccacctgagcggcagaaaaggtccggtcaccaccgacataacccgcttcaggttcaagtactacataacggacaaggtcgggttcgcctccggggcgacgaagaagggcttcgggtccaacttcgcgctcagcagggaggcgtacacggcgcttctggtcggggagcggttcgtgagaagggagctcggcttcgtcttcgccggagcccgggggtacatgatcccggacctctacaccgtggaggttcccaaagggcttcccggggctctgcagcgcgtcctcaggggcatccgctcgcggacgctcttcaccctcggacgggtgcaggaggaagacctcgacgaggagctcgaggacttcaggcgggagcacctggcgagcgggtacatgatcaacctgctcttctaccggcagaagcaggccaagttcgaggtcctcgggctcatccaggacatcccctcctaccggctcgaggagctgcggagccaggggaggaggaccggccgcctgtgggaggagctctatggcagcgaggcaagggacctcaccctgcagcagatctactacctcatcccggtgcgaaagagcggcgacgacatgctcaccaaggagatcctcgccttctaccacgccctgatctctggtggcctcatcgaccgcaagggcctcatagacggattcctggagctcatcagggcctaccgcttccgcaacaccgccgcctaccaggtatctgcccccgaagagggccaggaagaccttgcggtaacccgctacgtggcccagaccagcctgctgctcgcgtttctgagggacctcgaccagctgaaggaggaggaagtggatcaagggtatctggactgcctctcgctcgacgaagaggagaaggagtatctgcgaaggctgcgctacgacaaacagcagacggcgctctacctgctcggcgcgctggtcgccgagatcgcaaacgcccagtggcggctcgggccggagggaagaggcggggagaagacgatcctcaacaagctcaactaccagggcatgaccctcccccgcatccagcgcctcgccaccgagctcttcgacaagctccgccagtaccgctacacggaccgctccggcgagcggaggccgctcctgcagggccgcaatgaatccatcttcgcccaggcgcaggaactcctgaccgaagagtggggctcctggcgcctcacgccccccgagaacgtctactacctgctgagcggctactcccaccgaaccttcagggccatgaccgcgcgagagaggcaaacggcatag

SEQ ID NO: 988 - protein, 670 aa, Rubrobacter xylanophilus
MIESIYQIGRAILEEGGGRRTVLESLADSPPADGKGKSYIAILKLDTARWKLGVELRELGGEKNTAARYLWLGNAPAAMDDQDRLTTNNLVYLVSQTIPNLLMEGRLDPASALYGKLKRLKDELYLDLGEPSELGTKGGGAYRRYRYFWDVGRLGIEGPGLEELRQEVREGLRPGNVPQKVARALQSHFRQEIPERGVLFTLELDGELLVDDPAYQEYLERSLIGRVFEGAREEGVCHLSGRKGPVTTDITRFRFKYYITDKVGFASGATKKGFGSNFALSREAYTALLVGERFVRRELGFVFAGARGYMIPDLYTVEVPKGLPGALQRVLRGIRSRTLFTLGRVQEEDLDEELEDFRREHLASGYMINLLFYRQKQAKFEVLGLIQDIPSYRLEELRSQGRRTGRLWEELYGSEARDLTLQQIYYLIPVRKSGDDMLTKEILAFYHALISGGLIDRKGLIDGFLELIRAYRFRNTAAYQVSAPEEGQEDLAVTRYVAQTSLLLAFLRDLDQLKEEEVDQGYLDCLSLDEEEKEYLRRLRYDKQQTALYLLGALVAEIANAQWRLGPEGRGGEKTILNKLNYQGMTLPRIQRLATELFDKLRQYRYTDRSGERRPLLQGRNESIFAQAQELLTEEWGSWRLTPPENVYYLLSGYSHRTFRAMTARERQTA

SEQ ID NO: 989 - DNA, 774 bp, Rubrobacter xylanophilus
atgcgtctgaagatagtgttatccggggagcggggccacctgcacctgccgctgcaatacaacagcgcggtgcaaggtttcatatatgccaacctgagccggacgctggccgaccggctgcacaacaggggccatacctacggacagcgccgcttcaagctctttaccttctcccgtctcttcggcaggcgggaggcgggagaaggcggcatcagcttccgcggtccggtgcgcctctacctcggttcggccgaggcggaggtgctgggctccctcgccgagcacctgctcaggcggcccgaaacaaggctggggaagacgcggtgcctcgtggaggaggtgggcgtcgagcccgagccagaggtggaagacggcaggcccctgctcgtcagggccctctcccccatcaccgcctacaccacgctcgccacccctgagggcaggaagaagacctactactactcgccgcaagaggaggagtggggcgtggcgatcctggagaacataaagcgcaaggtcgcggcgctcgggtgggcggccgacgcggaggaggacctgcgcgaggcctacgtcaggcctcgcagggtgcgcagctcggaccagaaagtcctgcgtttcaagggcaccgtcgtgaagggctggatgggcctctacgagctgaagatgcccgaaccctacttccggctggcgtacgacaccgggctcgggagcaagaactcgcagggcttcgggatgatcgcgctgccccaccccaccgaggggaggaagaggtga

SEQ ID NO: 990 - protein, 257 aa, Rubrobacter xylanophilus
MRLKIVLSGERGHLHLPLQYNSAVQGFIYANLSRTLADRLHNRGHTYGQRRFKLFTFSRLFGRREAGEGGISFRGPVRLYLGSAEAEVLGSLAEHLLRRPETRLGKTRCLVEEVGVEPEPEVEDGRPLLVRALSPITAYTTLATPEGRKKTYYYSPQEEEWGVAILENIKRKVAALGWAADAEEDLREAYVRPRRVRSSDQKVLRFKGTVVKGWMGLYELKMPEPYFRLAYDTGLGSKNSQGFGMIALPHPTEGRKR

SEQ ID NO: 991 - DNA, 24 bp, Sulfolobus solfataricus
gctaatctactatagaattgaaag

SEQ ID NO: 992 - DNA, 927 bp, Sulfolobus solfataricus
aggaaaacaagatacttaattttaggaggtaaggaaactataggtaaaggaattgttgaattgaggtggttaaatgactgaagtacaagaggagaaagattataaactagctattgaggcatttaacctagtctataatgctctagataagaaggctagagaaaaatttaggagtagggcaagggatatggtggaggagatatatacttctgggttcatccccacgttgttttacataatatcaaaagctgggttagagaataataatgataaactaaccgcgttattaaattctccctcttcaaagagcattgatctgggcagtagcgatgaggcttcttatatggcctatttgtttgtcattctgtactatctgtctgagagaaacattataaataaagagtttctaattaataaactcaagaataaccgtttagaactcatagacaagttgtatgagttgtctcctataatttccgccaggataaagaggtatttaatggcaataaagagattggctgaggctttaatagaggtgaggtaaatggaggagttgttaatgtcttttaagctaaaggctatttatccgttaaccggaggttataataggcatagtataaacgaattttatgaagagaacgttaggcctactgaaattaagggtttatggaggtggtggaatagggttttattcaatacagtaagttatgtgaaagaaggaaagctttacacttacgactctatagataggctatttgaggacgttttcggaagtgaaaacaagaagtctgcagtaaggttagaggtgataactgatgagggaagcgataatcattttgaactatctaatgttgagttagataatgtgatagattgcctaaaggcaaatagggaagaaaaagtgaatttagactttagagataatac

SEQ ID NO: 993 - protein, 263 aa, Sulfolobus solfataricus
MKTRYLILGGKETIGKGIVELRWLNDSTRGERLTSYGIPSLCSREGRKIEGKGYGGGDIYFWVHPHVVLHNIKSWVRETNRVIKFSLFKEHSGQRGFLYGLFVCHSVLSVEKHYKRVSNTQEPFRTHRQVVVVSYNFRQDKEVFNGNKEIGGFNRGEVNGGVVNVFAKGYLSVNRRLAYKRILRERAYNGFMEVVEGFIQYSKLCERRKALHLRLYRAIGRFRKKQEVCSKVRGDNGKRSFTICVRCDRLPKGKGRKSEFRLR

SEQ ID NO: 994 - DNA, 471 bp, Sulfolobus solfataricus
gataatacgctaattattgaaatagaaggctcaactaaaattcccatttcttttaaatctaatttagatatagataaaattaaggatctagtatataagaataaacttcttagctttgagctcttaggttttaagagtattaaaatagatacaaagatttctgataaggaagtaattaaggaaatcttgcgtgatctaattacaaattatttagaatactttaatattaagcaagaagttacattcactcttaatatttatctagataagagtcttaagcataagcaaaactttgatgctaagcttaagtttgcgctacatagtctattagtttttatactgttaggaggaattggaaggaaaacaagtagaggatttggtggtttatcaatagttaatgcagaatgtcacgacggattatgtggtgaaatatatggaatagtaaataatatggagtcagaaaaagaaaaa

SEQ ID NO: 995 - protein, 156 aa, Sulfolobus solfataricus
MNTLIIEIEGSTKIPISFKSNLDIDKIKDLVYKNKLLSFELLGFKSIKIDTKISDKEVIKEILRDLITNYLEYFNIKQEVTFTLNIYLDKSLKHKQNFDAKLKFALHSLLVFILLGGIGRKTSRGFGGLSIVNAECHDGLCGEIYGIVNNMESEKE

SEQ ID NO: 996 - DNA, 1404 bp, Sulfolobus solfataricus
aaggatctcgctacagttcttccaaatatcattttttcgcaaactattgaacaatattttagtgagctaataaataatgaaagctataaattgagatcatggaataataactcagatttttttgtttattattttataaaagatatcaatatattgagaattaatagaatagacactaacgttaacagaaatgggatagaaaatatcttaaataggatatctaatgaactatcagcctctggtaactgccttaaagacctcataatgcaagaaatgagaaggagagcctttgctttagcatttcttggaaatagaaaatttagaaatattcatgaaatttatcctagaatattggaatttctatacgctaattacatcaaaagagaatttgtaaatttgataggaaaagaaagaaggttatccaacttaaggtttaagattcttgagatcaataatacttattatataatttcatatttactttattccagttatcttaaagatccaaattcgagcataaaggatacgttatatcagtttgctagatgtgtgatttaaaatgaaaatgagtataagtactcatttaccaagaattttagacacattaaatagaaataatattaatctattctcggcactgagtttaaccagcatagtatacaataactttggagaatttctctcgaataaacagtcatatagtgctaataacccactattaaagtatcaaattataatcctaaaagataaaaataaaactaaggatgtcgaagagaagaaaagcctatttaagagggaaatagctgaacttgtctcaaggaactttaaattagagggcgaaaaagtaaagaaatattttgataatctcaaagaaatactaaagtcgttaaaatacacgatagtagactttgaaataactactaggacgagggctttaataggagtttcaacttctttaggtaagctgatttttgactctgggatttctttcgatccatacatgaacttgccttacatacctgcatctgaaattaaaggtattgtgagaagttatattgaggataaactaggcgagcaagatgctgaggaaattttcggtaatgaggaaatggaaggtaatgtaaactttacagatgcctatcctactaggcctgagaatttcttgtttgtaccagacgtaattacacctcattataataagaagaagtctgaggctgatgctgagcctaagccggctattcatttaactatagctcctaaagtttcgtttagatttttaatttactataagagggaagatgtaggaaaaccaatttgtgattccttacctctggtgattatgaaaggtttaggtgctagatcttctgttggatattccttatttgaattaagtaagatagaggt

SEQ ID NO: 997 - protein, 423 aa, Sulfolobus solfataricus
MDLATVLPNIIFSQTIEQYFSELINNESYKLRSWNNNSDFFVYYFIKDINILRINRIDTNVNRNGIENILNRISNELSASGNCLKDLIMQEMRRRAFALAFLGNRKFRNIHEIYPRILEFLYANYIKREFVNLIGKERRLSNLRFKILEINNTYYIISYLLYSSYLKDPNSSIKDTLYQFARCVINENEYKYSFTKNFRHIKKYSILGTEFNQHSIQLWRISLETVICPTIKVSNYNPKRKNGCRREEKPIEGNSTCLKELIRGRKSKEIFSQRNTKVVKIHDSRLNNYDEGFNRSFNFFRADFLWDFFRSIHELALHTCINRYCEKLYGTRRARCGNFRGNGRCKLYRCLSYAEFLVCTRRNYTSLEEVGCAAGYSFNYSSSFVIFNLLEGRCRKTNLFLTSGDYERFRCIFCWIFLIIKDR

SEQ ID NO: 998 - DNA, 855 bp, Sulfolobus solfataricus
attagatgagtactgatgataattctagagaagaattcttaaactacaaaattatggcattacttcatgatcctccaaataaggcgtgggtgataacaagtcgtgcacataatctaacagtgcagttaagaagcgtaagagctaggaaaagtcatgaaagagtggctaagtatataatcaatcaattattcggcgatattaattctaaaacagttgataatgcagacaaattagctagttccatagatagatatctaggtagtatcgtatataaagaatatagcttattcagaaatagatcaatattcttaaagaacatacttctatcaaatattcaaagggatgtaggcaatttatttcctaaagataaatctaaactagataatttaatatcagaatataaaaagctattaaatgttacaaatacaactaatcttaatattttgaaatatcaattgttttatctaatttatgaactaatatggatagattctagatatgaaaatactcctgcagagactagaaaccctactcacacaatatttgaccatttatatgcaactgctgcaatgatgaactggatatttagtctagagaaagaagcaaaaggttacttactaggaatagatactataggagttgcggacttcataagcaagggaaagaagactagggacttatggatttctagttatttagtgtcagccctactctggtacgtaattacctggtttattgaggagtacggccctgacgttatacttttcccctcgttaaggtttaatcaattttatgcgttttaccttttagaaaaattaagaaaagaaaaaatatcagaggatgttatagatgaaa

SEQ ID NO: 999 - protein, 251 aa, Sulfolobus solfataricus
MRVLMIILEKNSTTKLWHYFMILQIRRGQVVHIIQCSEAELGKVMKEWLSISINYSAILILKQLIMQTNLVPIDIVVSYIKNIAYSEIDQYSRTYFYQIFKGMAIYFLKINLNIIYQNIKSYMLQIQLILIFNINCFIFMNYGILDMKILLQRLETLLTQYLTIYMQLLQTGYLVRKKQKVTYEILELRTSARERRLGTYGFLVICQPYSGTLPGLLRSTALTLYFSPRGLINFMRFTFKNEKKKYQRMLM

SEQ ID NO: 1000 - DNA, 3138 bp, Sulfolobus solfataricus
gaaataaaggagttaataactaagtacatatttaatggtgacgatctgtttgagaaattggaaatcccgccctatccgataatacctggtaggattacgttaatcttaccggggttaataagggaaggtgaagaatatacgcaagttccagacgataattacttcatttctaaggtaaaggagagatataatgaaggttggcgtaagctaattgagggattaaagtgttattctgaactaaagagggaagatggtttctggaatttagtatgtagagtgttaaaactgacggaggatttacttcaaactactcctttaaacattcgtgtgaaacaagtgagtgtaactaaggatgagatatttaacaatagcaaattacgctcagattcgtggaagatttacgacaataaatatcgtcaattagttagtgagtttaagaagagtaaattagtgaaagttactcccgagtcacgcttaaaattatttgaattaactaaatttgacaagttacctcaaattggtgagaaatctaaaagaggttacgaattctgtacttcatgtggtgttttgccagcggtaattataatgcccaaggaagacgaattcgagaaaaaattaattgagctcggaattgcgagagacgagaaagacgtaagatctataaagaatatgatttcaccaggtgagaggctttgcccatggtgtttagtgaaaagggccttaggtgctgagcccagacttatgagaattcttttgctaggagatctttgcagcgttgagaagattgtaaatgaaatcgttagtaaagatgttaagatagaaattccgtcaactagtgatattgcatcgattaaaacttttgaggaaatgattgagaagaaaaacgaaatctgtgaagatctaaaggaagaggaagtttgcgagaagcctaatgagagtatgctttctatgtggcagcggtttaataaaaattactatactgggataaatcttactatagatcctgaggagtattggtttagtgaaaagaggaggagatattatttctctctctttagaagacatagaataacttttccatcaccttattacgctttagttagggctgatagcgattacttaggggatttgttagaaggtaagttaactccttatttggctggaattattgattctggagattatgctaatattagtgagaagaaagaggaagtaaataaattattagaggaatatttagtaaatgccggaagtgggccaatagtagattacgttaagacagtattagagtgtataaggggaaatttaaataagtgttcatgtgcagtgaaaatttattctaacgaagttgccgaagtaatgtttagggcaaatcgtctgttacgtaaaaaactcgaaaagatagacgtagagagagaagtcgaaaacagtcttaaatattttagaactattttgaaagagggaaggataatagttactcccgcttggcatgtatcgatttcttcagcactcaatagggggcttctcgtagaattagaattgattaataaacataagggatttgtaatttatgcggggggagatgatttattggcaatgttgccagtagatgaagttttagattttgttaaggagagtaggagggcatttgcaggagttagtactggaagattaggtaacatgtgcttagagaatggattcgctagaatcaataatgcttactatccttcattacctatagtaggcagatcgtattctgtaattatagcacattatgccgatcctctatttttcgtcataaatgattcttataatcttttagaggaggggaaggaaatgataagatatagagtaatgtataacggagaatataaggacgctaagaaggatgttgcaatatttagatatcaaggtttaacatcagtaattccattatcgttaaagagacctatagttaactctgtgagtgactttaatgaaatagcctctatcatagacttaatattagaattaaagaagaggatcgatgagggtcatatttccgtgtccttactttatgattatgaggagtataaacacttaatcgtagctagtgatgagaagtatttaactgaattcttagtaaaggattggataaaaagaaattctcttagaaaacacgttgagtttactatagacgagaagttatacggtgttaggttaactattgaaaattatccgattaaaattcctaatgacctaatttctaacattgtttatactcttagaataatttacggtggcgagaagtgatgaagagagtgttaataaaaccattagaaccgttaatgtttagaagtcagggggaatttgagcccttaattaccggttcccacactgcagcacagtctttaataataccaagaccttctacaattgccggaatgttaggttatatattatttaacaagagttctgggactggggactggttatcggacttaacgaatttgctagatactatatatggaactttcatagagactaatggagagtatttatttcctctcagaatgggcaatcatttagctttagtagaccaacaacatcttataaatctacctattttgctagaaaaagagtacgaacaacgggagaaggggatttatgaacttttttatgataaaaataaactattccagatcataaatcatcaagataggataggaataagtatagataaaagtaccagaactgttaaggaacattatctttactcagctagatatttagcatttaagaaggaggttaattacgtaatattcatagataatgatgcgataagtgataagataaatggtaaaatagtgaactttggaggagaaaatagaatagctaagcttgaagttgatgattataaagtggatacaagtattgaagaagagtattacttaacactatctcctatcttaattcccgatgaagctttagatgatttacttgataacataagcgattatgttacaatgggtaaggtggataagataagcttaggattcgatattgctaatactaaaagaaaagagatgctaacggctattttagagggtagtatagtcaagagaagtattattgattttattaaaaaggagattaaca

SEQ ID NO: 1001 - protein, 1006 aa, Sulfolobus solfataricus
MIKELITKYIFNGDDLFEKLEIPPYPIIPGRITLILPGLIREGEEYTQVPDDNYFISKVKERYNEGWRKLIEGLKCYSELKREDGFWNLVCRVLKLTEDLLQTTPLNIRVKQVSVTKDEIFNNSKLRSDSWKIYDNKYRQLVSEFKKSKLVKVTPESRLKLFELTKFDKLPQIGEKSKRGYEFCTSCGVLPAVIIMPKEDEFEKKLIELGIARDEKDVRSIKNMISPGERLCPWCLVKRALGAEPRLMRILLLGDLCSVEKIVNEIVSKDVKIEIPSTSDIASIKTFEEMIEKKNEICEDLKEEEVCEKPNESMLSMWQRFNKNYYTGINLTIDPEEYWFSEKRRRYYFSLFRRHRITFPSPYYALVRADSDYLGDLLEGKLTPYLAGIIDSGDYANISEKKEEVNKLLEEYLVNAGSGPIVDYVKTVLECIRGNLNKCSCAVKIYSNEVAEVMFRANRLLRKKLEKIDVEREVENSLKYFRTILKEGRIIVTPAWHVSISSALNRGLLVELELINKHKGFVIYAGGDDLLAMLPVDEVLDFVKESRRAFAGVSTGRLGNMCLENGFARINNAYYPSLPIVGRSYSVIIAHYADPLFFVINDSYNLLEEGKEMIRYRVMYNGEYKDAKKDVAIFRYQGLTSVIPLSLKRPIVNSVSDFNEIASIIDLILELKKRIDEGHISVSLLYDYEEYKHLIVASDEKYLTEFLVKDWIKRNSLRKHVEFTIDEKLYGVRLTIENYPIKIPNDLISNIVYTLRIIYGGEKRECNHNRCLEVRGNLSPLPVPTLQHSLYQDLLQLPECVIYYLTRVLGLGTGYRTRICILYMELSRLMESIYFLSEWAIILTNNILIYLFCKKSTNNGRRGFMNFFMIKINYSRSIIKIGEVIKVPELLRNIIFTQLDIHLRRRLITYSIMMRVIRMVKTLEEKIELSLKLMIIKWIQVLKKSITHYLLSFPMKLMIYLITAIMLQWVRWIRADSILLILKEKRCRLFRVVSREVLLILLKRRL

SEQ ID NO: 1002 - DNA, 945 bp, Sulfolobus solfataricus
aacaacaatttgctagataggtttactaaatatgaaaaaataggatataacactcttatgaatctttgcaagttagcgttcagaaagatattaagctaattaatgctattacattcctacgtttgtccctacactttcatctcactcctatccttagaaagcctatatatggagtgaattatcgaatattggggatgtccacaattaagggtcattcaaggttttcacaattttctgaaaaacttctaatttatagaccgtatttaagtctatgtttcttatacgtttaggtaagtcactcttttcatatctatcatgcgttctcaaatattctaacggattgttctcttgtggtgctaagagtatttcaatatgaggattgaaaacaatgatacaaactctattcatatctacaccatttctttttaacatatcttttatcctattttccagtatttgggagtcttcattatcgctgtccacaaagatcatgattttgtcgtatcctttaaaaatggaactttttacaattcttactgtctttgcagagattatatttccttttccgcccatagaatgacaatctaatttgatttcattttctatctttttgttctcttcaagttttctgattaattcagcgattgcactgcaaccgtatttatcttctgtaattgctagaattattttcattatttttcacttagtataataaccattcacttaacaagataccgttctcagtcaacttttccttcaatttctctggctcttgtactttattaactttagtctctcctctttctttatcaagaattattatttctgaagggatccatgaagtcgataattagtggcgaatgtgtagttgctatgaactgtgagtcggaatagcgcattatatcaactagtctttcaatgtacttaaggtggagggagttctct

SEQ ID NO: 1003 - protein, 300 aa, Sulfolobus solfataricus
MNNLLDRFTKYEKIGYNTLMNLCKLAFRKILSLMLLHSYVCPYTFISLLSLESLYMEIIEYWGCPQLRVIQGFHNFLKNFFIDRIVYVSYTFRVTLFISIMRSQIFRIVLLWCEYFNMRIENNDTNSIHIYTISFHIFYPIFQYLGVFIIAVHKDHDFVVSFKNGTFYNSYCLCRDYISFSAHRMTIFDFIFYLFVLFKFSDFSDCTATVFIFCNCNYFHYFSLSIITIHLTRYRSQSTFPSISLALVLYLSLLFLYQELLFLKGSMKSIISGECVVAMNCESERIISTSLSMYLRWREF

SEQ ID NO: 1004 - DNA, 24 bp, Sulfolobus solfataricus
gataatctcttatagaattgaaag

SEQ ID NO: 1005 - DNA, 792 bp, Sulfolobus solfataricus
ttaaaagggttattgtctgcggagacgttaagggatttaggttgagggttaatagggttgaggtaattgataattgtttgtctctagatgttgagggaatagctgagagtattgctaggaggattggaaatagtaaggatagttatgttgttttgcttaatgggaattccaataagttcgctgcagctatgttttacttgttttccattatttgcaaaagggtgaagtttgtaatctacgatagggaaagggttgaactggatggagatgtttttagaaaggttgagattgacgataaaatgattactgtactgggggagataatgaatggacgttataagatagaggagattgagaaggatactgggattagtaaggctacaatttcgagggttagaaggaagttggaggagatggggttggttaaaaaggttgatggtgggaaatattgtattagtgaaaggggaaagatagttgtttacgatggaggatttttcagaaatgtgaaaaagggaggaaggtattatgagagtaaaacattatatacagagagagtttaattatagtgtgtcttctcaagatttacttgacattgctacaaggatagcaatatctgcaattaaacctaaacccaaaagtaataaaccagaaccatatgtggattctagtacgataaatagtttgttgagttttctgcaaagtagaaggaatgtaaatgagttgttactttacattatgcgtcaagctgggagagatgagatagatgaggaaaccgggaagttgttgttggcc

SEQ ID NO: 1006 - protein, 251 aa, Sulfolobus solfataricus
MKGLLSAETLRDLGGLIGLRLIIVCLMLRELRVLLGGLEIVRIVMLFCLMGIPISSLQLCFTCFPLFAKGSLSTIGKGLNWMEMFLERLRLTIKLLYWGRMDVIRRRLRRILGLVRLQFRGLEGSWRRWGWLKRLMVGNIVLVKGERLFTMEDFSEMKREEGIMRVKHYIQREFNYSVSSQDLLDIATRIAISAIKPKPKSNKPEPYVDSSTINSLLSFLQSRRNVNELLLYIMRQAGRDEIDEETGKLLL

SEQ ID NO: 1007 - DNA, 603 bp, Sulfolobus solfataricus
tagggagttaaaggatgctgtgaatcttttgggatatgtgaagtgggtttacgatactttaacggggttaaaagttaattacaataatgtgaagggtgttaagaccttcaaggagcttgttaacattttgagtaaggtgtgaaaatgtcttgtatggatcttgatgttataacgactgttgtgaaaattgagggtaagttgcgtaatgaaactctcttaagagtaggtaagggtaagactcaagatttcgctgaggctactgataatccaataattaaatatagggatagacctttaatacccggttctagtttgaagggggcattcaggagtttagtagagtcctacaccaagtcattaaacgacagtaaatattacgtgtgtgatttggacgataatagttgcgttagctgtgaggagaaaaagaaggataatgggattgtagaggggagatattgtattccttgtatattatttggctttaaggatttggcttccagggtttatattttagacgctattgctgagaagtactcaatttcccagagaacgatggttgcgattaatagggttttcggcggacaaatgcctggccatttgtat

SEQ ID NO: 1008 - protein, 195 aa, Sulfolobus solfataricus
MGVKGCCESFGICEVGLRYFNGVKSLQCEGCDLQGACHFEGVKMSCMDLDVITTVVKIEGKLRNETLLRVGKGKTQDFAEATDNPIIKYRDRPLIPGSSLKGAFRSLVESYTKSLNDSKYYVCDLDDNSCVSCEEKKKDNGIVEGRYCIPCILFGFKDLASRVYILDAIAEKYSISQRTMVAINRVFGGQMPGHL

SEQ ID NO: 1009 - DNA, 420 bp, Sulfolobus solfataricus
gggttttcggcggacaaatgcctggccatttgtatactttggattacgtagaccctggtagtgaatttagttttatgatgatgatttataatcttaacttgatcgagggggagaaggattggaaggcgaagtctgttgaagccttgaagttccttttagcgacactggttagagaggggattttcgtaggagctaggaagagtgttggttatggtttaattaagttagttgacgctaaggtgagtttatataaggcaccagatcacctagtttctccagttattgtgaagaaattggaagaggtgattggtactaatggttaactatacatttattgataagagagtgataaagaggactactatgattgagggagatgtggaaacggtatctccattaaagattggtgggggaaaggat

SEQ ID NO: 1010 - protein, 125 aa, Sulfolobus solfataricus
MFSADKCLAICILWITTLVVNLVLFIILTSRGRRIGRRSLLKPSSFRHWLERGFSELGRVLVMVLSLTLRVYIRHQITFLQLLRNWKRLVLMVNYTFIDKRVIKRTTMIEGDVETVSPLKIGGGK

SEQ ID NO: 1011 - DNA, 753 bp, Sulfolobus solfataricus
ggataatttcgatccatcttccctggctaaagattccatcctaaaggatgttgaaggtagaccgataattccaggatcatcatggaaggggatatttagatctactggtgaaagaattttaaggttaagaaatatagaagtttgtagcggtataggaaaggattactgtttgaataataatcgaaaagaaagggacttcaatagtgcgttgaaggaaaacgttgatcaagcattagagatattttgggattatacttgtttgaactgtaaagttttcggaacgatgagtgttataggtgctgtgagatttctagattcacttcccattagttactcattgaacactagatcgatgatagcgataagtaggacggagggagctgtagctaggagggccttagtaactgttgaatacgttgatgtagggtctaaatttagttttaagatgatggggtacaatttgcctaattacgctattggttacttaattacgataatgaagaatattcatgatggctttacacaagtcggagggcataagagtagggggttcggttttgtgaagttcggtaaggttaagtttaccgatcttggagaaaagaggattggtgatgaggatattcaagttaaggatgtaggtgatttagtggaaggaaatggagatgagtttttcgggagaatgaaaccttttatggaggctttcaataatgcaaagatcccctatccgaagaagtaactatactcctagaaatg

SEQ ID NO: 1012 - protein, 217 aa, Sulfolobus solfataricus
MFRSIFPGRFHPKGCRTDNSRIIMEGDIIYWKNFKVKKYRSLRYRKGLLFESKRKGLQCVEGKRSSIRDILGLYLFELSFRNDECYRCCEISRFTSHLLIEHIDDSDKDGGSCSEGLSNCIRCRVIFDDGVQFALRYWLLNYDNEEYSWLYTSRRAEGVRFCEVRGVYRSWRKEDWGYSSGCRFSGRKWRVFRENETFYGGFQCKDPLSEEVTILLE

SEQ ID NO: 1013 - DNA, 846 bp, Sulfolobus solfataricus
ctatactcctagaaatgaaaagggattagaaggggttatagagttacagctaaatgtagtttccgattacttacacgtaggttctgggaagtatgatgtggaggtaatgcgtagcgttagtgacgttaaacgattggttgaggattatttaagcggaggtaataaaagaatccctaataatgttgatcagtatttctcaatggtagcttttctaatggttagaaataaggataatgttgttattcccgggtcaactattaagggaatggttaggagtaggttggagttatctgtaccgggttcatgttatatagttactgggcattctacttcatcttctgcagtttataagaggattttcaatcctgatccaaataggggtagtgataggtttgacgttaataaatttccacaagtttgtccagtttgcgatttattaggcaatatgggattagctagtagggtatcgttaagtgatttcgtaatgacgtctggtaaggtagattacgtaaacgttaaaggaagggattatgaagttgttactaagggttcgattttcgctggaaaggttttgtataagtctctgaagcctgttgaaattgggatgttattatatggttttggtttcgttaaggattgtaatgggtctaaggttatgctattgggtaggtttaagttttctgataagaggtttggaagggttaaatttagtttgaagactcctatagcagattgtaataaacttgtttctgattttgttaaacaatttaatcctagatatattaatgaggagtggtagaatgaagaagtgtattagatatgatttatatatagaggagtgtaaac

SEQ ID NO: 1014 - protein, 225 aa, Sulfolobus solfataricus
MYSKKGIRRGYRVTAKCSFRLLTRRFWEVCGGNARRTIGGLFKRRKNPCSVFLNGSFSNGKGCCYSRVNYGNGEVGVICTGFMLYSYWAFYFIFCSLEDFQSSKGVRISTSLSSLRFIRQYGISGIVKFRNDVWGRLRKRRKGLSCYGFDFRWKGFVVSEACNWDVIIWFWFRGLWVGYAIGVVFEVWKGIFEDSYSRLTCFFCTISIYGVVERSVLDMIYIRSV

SEQ ID NO: 1015 - DNA, 25 bp, Sulfolobus solfataricus
tctttaaaatctaacgatgtataaa

SEQ ID NO: 1016 - DNA, 741 bp, Sulfolobus solfataricus
atgtagttcagttatagaaggtaaaataatagatgcattcaataagttttatgagaagttccgcgaaatagaaaaaggttgtaataggataaatggttgggaggaatctcacgttcctctggctcctttaactgaaagcaacggcccagacagaattcaaattatagaggcttgtaataaaaacgatatcatcgatgtacttaacgtcatacataaatctgtcctaaagagttcctttaaatctaatatcagagatcctgcacctcacatacacacatggatttacggattgccgaggaacgcaagtataacggtatccactacgctaacagatatacgcgatgtcgaaataaaggaaaaggtgggagagaataacgttagaaaggaaattgaagatctcttcgaaaatttaaagaaaagcggtaacatcaaaattattgaaagatatgataaaagggcaaataaacaagtgcattatttacgctctccttctggatattataaactggaaggctctaaacttactgacgttaaaagagaatcaatgtttatcatttcaccgataagaacaagtaataacagttacaccatttccatattgccgttcttgtctcttaaggataacgaagaagccctcgataacttagtacacataggcatacatgatggtagaacaattcacatagtaccgttaaaggaaataattagcatgaataaagctgatagttatctcttcgacaa

SEQ ID NO: 1017 - protein, 210 aa, Sulfolobus solfataricus
MFSYRRNNRCIQVLEVPRNRKRLDKWLGGISRSSGSFNKQRPRQNSNYRGLKRYHRCTRHTICPKEFLIYQRSCTSHTHMDLRIAEERKYNGIHYANRYTRCRNKGKGGRERKGNRSLRKFKEKRHQNYKIKGKTSALFTLSFWILTGRLTYRKRINVYHFTDKNKQLHHFHIAVLVSGRRSPRLSTHRHTWNNSHSTVKGNNHESLSLR

SEQ ID NO: 1018 - DNA, 1413 bp, Sulfolobus solfataricus
tctcttcagttaagtgatgaggtgagatctttaggtaatttaatcaaagataaaaatagagtctacgttttagataatagtataggattatcggccgtcgaatccgctttaacaagagttactagaactgaattagatgataatacgaagacttcgaaaaacatatggtctgaggaatatatacctcaaggtacgatattgcttagcgggatattcgaaagagaaataagtaatagttattgtgaggaattaaatagaaataatgttaatatagacaatgaattcttaaaattgattgataatgtttcagtatttataggtggtaaggagagcataggtaagggattaactaagattaaattaaaaagggtgagttaggtttggaatcagaatacgttaaattcgctacagagataggtaagagaatagtttcagcccaatgtaaaatacaatccgggccttctaaacccggattgcttaggagatccgcagattttccatcactaatgttaggtatagggttttctcctgcatttacattctacatttcaaaaatagaggattacaatcgttttaaggacatttacaattatctatcaggcggtaaaggaaatcctgcctcaatttgcaaggagttggataaaagagaaggttcgggttatgctggctacgtagcaattatactcttggtattaaataatataggtaaacggataaggataggagatgaccctaaggatatatattattcattactagacgtagcctctagcgttgggtctaaagaagaaaggctaattcttccatacttaaatgagataaaaaaggtattggaggcgttaccatatggttaatctagatgagttaaaacaagaagtagaagagttaattaggagtaaaagagttgctagaattaatttcgttggagtaaccccttggtggggaagggatcataggggttatacgtcagatcacgtagatgaggacggaattgtaggtaagctcaggtggttcttgagaactgtatacaataggttttgcgtcaagaatttgaatagttatgatgaagccgatagttacgtttttgaatatttaggctctggaaatcgaaaatcgctctatattttcaaagtaagtgactctagatcaatacctaacaagaaatatgaaaagttaaacagagtaaacgttataattagaggcaaagagcaggaaaatttaattccaagagatatgaatttcacgctagaaatcttcagaagtaatgacgatcctaaatatgacgaaatagtagtcggaggagttttaatcaccatagcctttttgggtataggatttagccccaataggggtttcggtagatttattccggctgaatgtaatgatactgtagctaaggatatatgtagttca

SEQ ID NO: 1019 - protein, 453 aa, Sulfolobus solfataricus
MLQLSDEVRSLGNLIKDKNRVYVLDNSIGLSAVESALTRVTRTELDDNTKTSKNIWSEEYIPQGTILLSGIFEREISNSYCEELNRNNVNIDNEFLKLIDNVSVFIGGKESIGKGLTKIKLKRVSVWNQNTLNSLQRVREFQPNVKYNPGLLNPDCLGDPQIFHHCVGFLLHLHSTFQKRITIVLRTFTIIYQAVKEILPQFARSWIKEKVRVMLATQLYSWYIIVNGGEMTLRIYIIHYTPLALGLKKKGFFHTMRKRYWRRYHMVNLDELKQEVEELIRSKRVARINFVGVTPWWGRDHRGYTSDHVDEDGIVGKLRWFLRTVYNRFCVKNLNSYDEADSYVFEYLGSGNRKSLYIFKVSDSRSIPNKKYEKLNRVNVIIRGKEQENLIPRDMNFTLEIFRSNDDPKYDEIVVGGVLITIAFLGIGFSPNRGFGRFIPAECNDTVAKDICS

SEQ ID NO: 1020 - DNA, 474 bp, Sulfolobus solfataricus
tatatttataagctatcttcagattagataaaatgtggttcctaaatatctagtattggcgtatgcaataacacccatacacgtaggtgcagggaaatcctctactggggtagttgattcgccccttgtaagagactctatcggttatcccatagtttacggctcaagtcttaaaggctcattaaagtcgttcttaatagcgaaaaatgaaagtttagcaaaatgcgttttcggcggaaagccagaggaggaaaatattttaacgagtaaatacgtactcactgacctcattccagtattttatcccgtttcaagtattgatgaaggatacatttatattaccaccagatatttaataaatcatatcgaagatttgatgagtagactgggtataggcagtttatacaaagaaagtaaggagaagagcgaggtaaggatatttctgggcaaaatcagtactgaattatctcttca

SEQ ID NO: 1021 - protein, 145 aa, Sulfolobus solfataricus
MIYKLSSDIKCGSISSIGVCNNTHTRRCREILYWGSFAPCKRLYRLSHSLRLKSRLIKVVLNSEKKFSKMRFRRKARGGKYFNEIRTHPHSSILSRFKYRIHLYYHQIFNKSYRRFDETGYRQFIQRKGEERGKDISGQNQYIIS

SEQ ID NO: 1022 - DNA, 810 bp, Sulfolobus solfataricus
tctattcaaagtgttagcaatctggctaaaaacttagtcttcagactattaataattaaggggagaggggtgatatacggggcctcctagaaggattgtgatgaataccggactcatccgtgaaaaacaccttaacacccttcttaataacaccctttagtctatccctcaagatgttatctgcgttaaagggcctcttcttgttatatgtaggggattttcaatcttttcctagctattctccttgattcaatggagaaggagttctattattcacttttgacgcatgattatacgagctattgggttgataagtttcgcgacgtgctcgagaaactggaggaagaggttagtatgaaaaagtttttatcgattctcctttattatttattctcaagttctatcaagtttagttcattaactattcagacttattcgagtgttcttctatattttgtattgagaaatattaatttctacttcgcatctattaggaaaaaggctataatcatggaaagtaatttataccctatttgttgaatgtttaatgagggaattggcatatcgtgagcccttatggtaataccgattccctcgctttaaaccttttttcaatttgttgaattcttaatattgttataaacttggttgtgttcaacaaattctatattgctcaatcagaattatttttgtaagatgattttaggagtaccgtaaagggcgaggtttcctaaactattggtgagagttgaggctttagagatattcttgtccttcacactacatgaaagtacaatcagctattgaaac

SEQ ID NO: 1023 - protein, 256 aa, Sulfolobus solfataricus
MIQSVSNLAKNLVFRLLIIKGRGVIYGASKDCDEYRTHPKTPHPSHPLVYPSRCYLRRASSCYMGIFNLFLAILLDSMEKEFYYSLLTHDYTSYWVDKFRDVLEKLEEEVSMKKFLSILLYYLFSSSIKFSSLTIQTYSSVLLYFVLRNINFYFASIRKKAIIMESNLYPICMFNEGIGISALMVIPIPSLTFFQFVEFLILLTWLCSTNSILLNQNYFCKMILGVPRARFPKLLVRVEALEIFLSFTLHESTISY

SEQ ID NO: 1024 - DNA, 24 bp, Sulfolobus solfataricus
gataatctactatagaattgaaag

SEQ ID NO: 1025 - DNA, 888 bp, Sulfolobus solfataricus
agtattggaaaggggttaatgaaggtctttataggtgtctaaattggacgaagcggtcaatttagctatagaatttggagagaaaatatttaggctcactgaaatatgcagtagtaaagagtttataagtggttttagggctagggctagggaattccccttgatggttagacaaatgggtttaataccttcacttactttcttgttttctaagattgatgatggtgttctaataccttggttatattatttagttaaggaagatgttaaggatactaagaaaatatgcaatgaggttagaaatgagggttatacatcgtacttaatggtaaacttgaattcgataaagaggaaattttactattttcgattcttcgataaatgtattgaagaactgggcagtaaatctgagattccgtctgattttattagctgtgtaaaaaaggactttgtatccatgttgaatgagctaaaaagtaattcgaagctgttggctgaagttgaggactttgttcttaatttctcaatagagttaaagaagatagttgatggaatttatggtggtggaacataacgattcttgatattgtatagcatttatcggaaaatcctggcagttcaagaggcccataaaaactttttaaaattagaacctttaattttggtatgaccaaagaattgacgagggaggaatactataaggcattggaaaaggcagtcaacgaggtcatactatccatgactggaacgaggaaggatgttgccaagaggctactcttgggggcggtggtgggaagaaatgctaccgagatagctcaagaggccgagatgaactacgagaccgtactgaataacttggacaaggcagctcaggttaatctaatcgag

SEQ ID NO: 1026 - protein, 263 aa, Sulfolobus solfataricus
MIGKGLMKVFIGVIGRSGQFSYRIWRENIAHNMQRVYKWFGGGIPLDGTNGFNTFTYFLVFDWCSNTLVILFSGRCGYENMQGKGLYIVLNGKLEFDKEEILLFSILRMYRTGQIDSVFYLCKKGLCIHVEAKKFEAVGSGLCSFLNRVKEDSWNLWWWNITILDIVHLSENPGSSRGPKLFKIRTFNFGMTKELTREEYYKALEKAVNEVILSMTGTRKDVAKRLLLGAVVGRNATEIAQEAEMNYETVLNNLDKAAQVNLI

SEQ ID NO: 1027 - DNA, 540 bp, Sulfolobus solfataricus
taatcgaggtcgtgaagaagttagtcggggatcatcctgtccttctcataatagacgacacccacgaccacaagctctacgctagggccatgccggtctccagaaacggggcgcagatcttctactgcagggcgcacaagagattcgagtccgcgatccaactcctcgtgattggcgtcaaggatctggtgaacaaccagatctacgtgatccacataattgcctacataccccgaaaggtggaagaggagctcaagcgtaggggtgaggaggtgaagttcaagaccaagatagatgccctcttggagtttctctcctccctctcaggtttgaatgtgaaatccaaggtcttcgactcgtggtacgtgaactcgaggactctccaagggaatactgtgggggaactcaagtccagcgcgcgagtcgtcgagagtggcagatccgtacccgttagcgagttcccccaaggggagtacctggtagagtacttggggactcccataaagttacttgttatagatgattataagggttacggga

SEQ ID NO: 1028 - protein, 163 aa, Sulfolobus solfataricus
MSRSRSSGIILSFSTTPTTTSSTLGPCRSPETGRRSSTAGRTRDSSPRSNSSLASRIWTTRSTSTLPTYPERWKRSSSVGVRRSSRPRMPSWSFSPPSQVMNPRSSTRGTTRGLSKGILWGNSSPARESSRVADPYPLASSPKGSTWSTWGLPSYLLMIIRVT

SEQ ID NO: 1029 - DNA, 1065 bp, Sulfolobus solfataricus
gagctcaaggccttgggactcgagggtgggtccttcttgacctgggttaggaactcaggcttcgtggccttgaaggctctctccctcctcgttgtccaatacttcaagtactccacgggtctggtactcggggccaaaaggttggccagattgataaaaagcatttaccgtgaggcgggtgggatcaaaaaactgttcaagaggaggagaaaaccgtaaagtgctactctattatttactcattaataaacttctaaaatacaaagaactgagaagatttttcgaaaatttttacagtatatataagaagagtggaagcagagcaaaagcacgaaagaaagtaagtgctgctgacgtactagcctcagagtataatcgatgggtattaaactatctatattcgacttcacagagaaaacgttcatttaaatatttcaagtctagctatatatttagatatttcaggtttcacaatatattcaacccggaatacagtgtcgacacaggttacgatatcgactataataaaatgggccgttttatggaaaaattccgtgaaataattgataaatttattgaaaaacaaacaggaaatacactagacaaaacgaaaatatttaaactaattaaatctgtatattttctaatttacactatatatgaacctttatggatttattttggccttccagtagaagtagaagattccagatctccattttatacaatctttgaccatttatatgcttcagcttcaatgattaactgggtatattacgatgatagatctgaccctaaaggcaagaaggggaagaaaacacagcaagatacttattctaaaaatgcacctaaccctaaagggttttacgttgtgatagatattcccggtgttcaagaaataattaattcggcaagaaaggctagcgattactgggctggaagttggatgttatctatgataatatggttaaccgtttggcagttaattaaagagtacggacctgatgtgttgttagcaccaacaactaggtttaaccctatttactacgcaatgactttaaacta

SEQ ID NO: 1030 - protein, 321 aa, Sulfolobus solfataricus
MLKALGLEGGSFLTWVRNSGFVALKALSLLVVQYFKYSTGLVLGAKRLARLIKSIYREAGGIKKLFKRRRKPSATLLFTHTSKIQRTEKIFRKFLQYIEEWKQSKSTKESKCCRTSLRVSMGIKLSIFDFTEKTFIIFQVLYIIFQVSQYIQPGIQCRHRLRYRLNGPFYGKIPNNIYKTNRKYTRQNENITNICIFSNLHYITFMDLFWPSSRSRRFQISILYNLPFICFSFNDLGILRIPRQEGEENTARYLFKCTPRVLRCDRYSRCSRNNFGKKGRLLGWKLDVIYDNMVNRLAVNRVRTCVVSTNNVPYLLRNDFK

SEQ ID NO: 1031 - DNA, 2976 bp, Sulfolobus solfataricus
gcaccaacaactaggtttaaccctatttactacgcaatgactttaaactatttggaaaaagaattcggaatggatgacgggctaaagaaagaaattgaggagattcttaatacgatcctaggcaagcttagtggaatttacgattatactcagttccttaaagaagcaataatccccgcgacagcaagtttaatcttacctaaagaacaaaatacttgtagtataaagctcgagcaagagatattcgagtactataagaatgcatataattgtatagtgaaggaaattccgaccgggaatgttcagagtgacatttgtaaagaatttgtagaggcgtttaacattatctatcagtcgaattcaacattagataatttaatgaatgtgataattaacgaggctgaaaaatatgcagataaaattttaattagacctgcaatttacatcgtagatattgatgatataagagatgaggtagagagtgatttaaggaataaaaatgtgaatgcgattttaaataacaagcaattcaatcaacttgtaccacaatacatctttcattatatttccactaagttatttagagagaaagttaaggaaaaatataagcgagagattcttcctaaacctaactggtttacttcgtttaataaagagtttgattacataaatggtggtaaaaattgggaatattgtaccgtttgtggtaatgagcctgcgataattaactttggtaaggaaaacgatgattactctgcttctactaaatgtgaaattttaaggttagcataccagaataggtacaaggtaactgatgacgacttaaaagacctaaaggtgtggtttaagcctggtgaaaagttaggtcctttatgtataattaaaagaggattatatttcagattacgtaaaaatttagagaaagtgtttaagagtactgatgatatcgcttacagctattataagaatgttatacaacctagaattaaggatctagatgagtgtgagaaactgaagaatttcttaaatgctgaagagttagacgtttatgagactttcggaaacccggtaatagctagaagattgttcagtaaatgtactgaagttgaggacaaaaagttaccttgtatacaaaaggaatatggggtaagtgacgttaataatgcgtttatagatgctcttaaaggttatagagagttttatgctatagttaaggctgacgctgatgatatgacagaattagctaggggtgagatagatgcggagaaatactttgaagttttgcctcgattaataaaagaaggagagtttgaagaaaaagagtctaaaaatcctaaaaacagagcatgcaaatttctaatttacacctactctaatatgacctcaattgctaaagtcattaacgacggtaatatcttaatgtcgcccacctatagggttgcattatcactagctatgatgattacattacttagagatataaagactgtagaagttgagaattatggacaaatcatttatgctggaggagatgacgtggttgcgcttgtccctattgataggctaattgatactttaataggtttggagaggaacttcgtaggcgagaacgggttctttaaagttagacaatggtatatcccgacattctatcctcacggtagatcgttttctgttagaatagctaatatagcggacttcatgactaatgagatacaaatggctacagaattacttaatagagtgaagaaggttaaatgggagtttccaaacggagaagagaagagaagtaaattctctgctattctttctacttcgaggacaagttatgagagtgtattacccatgtgggattttaagtacttgattctgctaaagaagatgtggctacttaatttaagtaataagttgagttcttccgtattcgaagattatgaaagcgcttttaaggagttcatcacgtcggaaaggaaattaacgaaacggttaatcaattacgtcttacttaaaaataatggtaaagaattagttgaggatttcaataaattagatttcttgtcattaaataagaaaagtaacgtttataatgaaatatttaaagcatttagaataatgaggggagtaatttgataaagatgaggattaagccattagaggaatacagaattggattgagacaaagtagtggaattgttattgagaacgttgacgtaatatcggcttttccatcacctactacaatactaggaataataggggcgatgaagaacgccaagccttctcaactttccgggattgatgatttaagggaagcttatacatcacttaccggtaataatacgttaagtggagattgcgactcttctgataatccattgatctggggtccattaataaaggaaaaagacaataaaatttacacccctttatttttcaataagttaattttagatcctattgaatacgtaaagacttcgttaaacgagaacgttaaggtgcaatcagaaagtctggtcaaagagattgggattcaaatcagaaggatgaatcagatgaataggggtagtagaaatactatccatttattctatcagaagttctttgggagtaactacgaattagagtactgtattaacatagacgatttaaagaagcttgttaaagaaaatgttgtagcgcttggaggagaaaataggtatgcaagagttcgcatcgataacggtaactgtaattttggaaatggtaactatgcgatattacttcaaccactactttttgagagcgatagtgagtatttcgttagattagataacgttaaaggattgggatgtatagatgagatttacggtgttttagttgagaagggtaataagatcgactttaataactttaaggttaaggttgtatattacgctttgggttatggaaatgaaaggagacctatgttacaagctttaccgcccggtactgttataa

SEQ ID NO: 1032 - protein, 963 aa, Sulfolobus solfataricus
MPTTRFNPIYYAMTLNYLEKEFGMDDGLKKEIEEILNTILGKLSGIYDYTQFLKEAIIPATASLILPKEQNTCSIKLEQEIFEYYKNAYNCIVKEIPTGNVQSDICKEFVEAFNIIYQSNSTLDNLMNVIINEAEKYADKILIRPAIYIVDIDDIRDEVESDLRNKNVNAILNNKQFNQLVPQYIFHYISTKLFREKVKEKYKREILPKPNWFTSFNKEFDYINGGKNWEYCTVCGNEPAIINFGKENDDYSASTKCEILRLAYQNRYKVTDDDLKDLKVWFKPGEKLGPLCIIKRGLYFRLRKNLEKVFKSTDDIAYSYYKNVIQPRIKDLDECEKLKNFLNAEELDVYETFGNPVIARRLFSKCTEVEDKKLPCIQKEYGVSDVNNAFIDALKGYREFYAIVKADADDMTELARGEIDAEKYFEVLPRLIKEGEFEEKESKNPKNRACKFLIYTYSNMTSIAKVINDGNILMSPTYRVALSLAMMITLLRDIKTVEVENYGQIIYAGGDDVVALVPIDRLIDTLIGLERNFVGENGFFKVRQWYIPTFYPHGRSFSVRIANIADFMTNEIQMATELLNRVKKVKWEFPNGEEKRSKFSAILSTSRTSYESVLPMWDFKYLILLKKMWLLNLSNKLSSSVFEDYESAFKEFITSERKLTKRLINYVLLKNNGKELVEDFNKLDFLSLNKKSNVYNEIFKAFRIMRGVIRGLSHRNTELDDKVVELLLRTLTYRLFHHLLQYEGRRTPSLLNFPGLMIGKLIHHLPVIIRVEIATLLIIHSGVHRKKTIKFTPLYFSISFILLNTRLRTRTLRCNQKVWSKRLGFKSEGIRIGVVEILSIYSIRSSLGVTTNSTVLTTIRSLLKKMLRLEEKIGMQEFASITVTVILEMVTMRYYFNHYFLRAIVSISLDITLKDWDVMRFTVFLRRVIRSTLITLRLRLYITLWVMEMKGDLCYKLYRPVLL

SEQ ID NO: 1033 - DNA, 945 bp, Sulfolobus solfataricus
ataaaagtaaaagagacgtgtaacaatgctaaggctttggggttattaagcgaattagggttcggagcaatttatagggttgatccaggcaatcgttaacacctcagtatgggaatctcttttttcttgtaaaaatgagatataggaaaaattgagaggatgagaatttatggagtagcatttatcggaaaatcctggcagttcaagaggcccataaaaactttttaaaattacagcctttaattttagtatgaccaaagaattgacgagggagcttccggtataaaaacctttccgtgaaaatcgagcatagtacacactacttattcaagtgatgtcacctgctttactcgctagcatcaaagggcttattataatacagcacagcccaagtaataacagcaagcttcctggcacaagcagtaatcaactttttacccttcaaattctccttgtgctcctcataaaaccgcttgataataggattaaccttgatagcagttaaagctgcaagatagaaagccctcctcaaaacagcatcacccctcctagatatgcctctcgatacaacactcttcccactggattcaacaagaggatcgagaccacagtaagcgacaaacctcttcttgttaccaaaacgcttaacatcaccaactcttgctaaaattatacaacccagcgttctgccaatacctggaatcgtgaagatcaaactatccttaggaacaagatcctcaagctcttcctcaatctccctcttcctaacctcaagcctctccaactcatccaagaggaacctaacctcagataatactatattatcctcccccctcaatacctcattcaagttcttcttggacaaactgtccttatagcctagaagtattaaatccctccttagcctattcttaaccctaacaatgctccttgtaataaaatccc

SEQ ID NO: 1034 - protein, 287 aa, Sulfolobus solfataricus
MKVKETCNNAKALGLLSELGFGAIYRVDPGNRHLSMGISFFLKDIGKIERMRIYGVAFIGKSWQFKRPIKTFNYSLFYDQRIDEGASGIKTFPKSSIVHTTYSSDVTCFTRHQRAYYNTAQPKQQASWHKQSTFYPSNSPCAPHKTADPQLKLQDRKPSSKQHHPSICLSIQHSSHWIQQEDRDHSKRQTSSCYQNAHHQLLLKLYNPAFCQYLESRSNYPEQDPQALPQSPSSPQASPTHPRGTPQIILYYPPPSIPHSSSSWTNCPYSLEVLNPSLAYSPQCSLN

SEQ ID NO: 1035 - DNA, 25 bp, Sulfolobus tokodaii
gatgaatcccaaaaggaattgaaag

SEQ ID NO: 1036 - DNA, 543 bp, Sulfolobus tokodaii
atggaggttgaaggaggtactatatactcttttgaggtaggaggcagttacgatgacgtgatttacgcattaagggatttggataagaagagggtttttaatacgacatgggaagtagttaatatcaagcttagagaagtaaaattttgctgcaaaggaaggattagagtaactgtaagaacaccagcattgattgcagaccctttaatgaagtctaaaaagaaaagatttactaatgcattctccttcgtatttgcagtaaacttcatggatcacttaaaaattacgagagaagagtacaaaaagattgtactagagttggaggaaaaagtgagagaagaaccatcgaaagtcggttatgtgtctgtaatctatgctggaagaaaggtcatagggcttataggtgagttacgttatgaattgttggcagttgatgagagaataattggtactttagaaaatgctatagccaaaggtataggtagttcaaggagaaacggattcggaagaatagaaatgagatgtgaggattatggaatataa

SEQ ID NO: 1037 - protein, 180 aa, Sulfolobus tokodaii
MEVEGGTIYSFEVGGSYDDVIYALRDLDKKRVFNTTWEVVNIKLREVKFCCKGRIRVTVRTPALIADPLMKSKKKRFTNAFSFVFAVNFMDHLKITREEYKKIVLELEEKVREEPSKVGYVSVIYAGRKVIGLIGELRYELLAVDERIIGTLENAIAKGIGSSRRNGFGRIEMRCEDYGI

SEQ ID NO: 1038 - DNA, 645 bp, Sulfolobus tokodaii
atgagcctctaccttggctgtggagactctctcttcaatagtctcatatctctaaggagagaacgtaatataagagtcggtataaacgaaatttactatgccgaaaaagtacagataaagaataagcacccgctaaataatttattcgataaaatactaccagagtgccgtaagagtacacgatgtccagagtatacctggtcagctgaaagtgcaatattacaaatactagaaagaaatgggtatgaagggttaaagaagaagcagaagattatatacaacaatattccttattgtccagatgcagtaaaaataaacccgcctgactcaaataagcctaattaccttatcgaagttaagtctacgaaagccaaacgtgggagtaatacctatcattgtttagttaagaaaggggcactccaaagcttaagaaacgctgctgcatatgtaaaatcaggtaaagttagggaaatattacctaaactagcgattggtacttatgttattatagagaaagtgcaaaaggaaaatgaaaaagtagcaataactctacaagatatacagatatgcggaataggttggaagggatcatttaaaatagatatccaatcggcggacgaaatcttcaattttatagggggttga

SEQ ID NO: 1039 - protein, 214 aa, Sulfolobus tokodaii
MSLYLGCGDSLFNSLISLRRERNIRVGINEIYYAEKVQIKNKHPLNNLFDKILPECRKSTRCPEYTWSAESAILQILERNGYEGLKKKQKIIYNNIPYCPDAVKINPPDSNKPNYLIEVKSTKAKRGSNTYHCLVKKGALQSLRNAAAYVKSGKVREILPKLAIGTYVIIEKVQKENEKVAITLQDIQICGIGWKGSFKIDIQSADEIFNFIGG

SEQ ID NO: 1040 - DNA, 507 bp, Sulfolobus tokodaii
atgttgcgacattggtttagtaaaataatactcttacgtttagtaagtaaaataattatcctaaagtttattaatgtctgtatgaatagaatacttgtgtcccagctggttaagacggacacggatttgttagatatagcaaccagaattgctatgtcagctcttactccagtacaaaagggaaaagaacaaaaacctgcagtagatgccagtactataaataacctattaacctatatacagagtagaaagagcataaaagaactgttagcatatattttgaggcaaacgggcagaggagaaatagataggaatactagtaaattattactttctgcattaaaagatttgaaagaaaatgaagaggatataaataaagccctagaacttttaggttatgtaaagtggatttatgaaactttagacggtcttgaaatagatgtaacacaacttaaaggtgttgataatttccagaaattagtaaacgaattagtaaagaggatgtga

SEQ ID NO: 1041 - protein, 168 aa, Sulfolobus tokodaii
MLRHWFSKIILLRLVSKIIILKFINVCMNRILVSQLVKTDTDLLDIATRIAMSALTPVQKGKEQKPAVDASTINNLLTYIQSRKSIKELLAYILRQTGRGEIDRNTSKLLLSALKDLKENEEDINKALELLGYVKWIYETLDGLEIDVTQLKGVDNFQKLVNELVKRM

SEQ ID NO: 1042 - DNA, 729 bp, Sulfolobus tokodaii
atgaacgatgaaaaaccttgttatgatctagatgttatcagaagtataataaaaattagtggaaaaataaaaaatgaaacacctctgagaattggatatggaaagtctcagagtttcacagatcccacagataatcccatattaaaagtaaatgaaagaccgattattccaggatcgagttttaaaggagctctaaggagtttggcagaagcttacgtaaaatcgtggaatgatccaagatatattgtatgtgatttggatgataataaatgtactagttgtaatggtgaagaaaaatactgtataccttgcataattttcggcttcaaggatctctcttctagggtttatatactagatgctgttgctgaggaatactctatttcccaaaggacaatggttacaataaatagagttttcggaggtcaattacccggtcatctttacacattagattacgtagaacctaactctgttttcaacttctcaatgttcctatataacctaaacatagttgatggagaaacggaagaatggagaaagaaagcggttgaagttgtaaggtatttattaaaaaccctaattactgacggaatatttataggagctaagaagagtgctggtttcgggctagtcaaattaacatccggggaaattgaagtacgcaaatcaccagaccttatgaaatccattaaattagaccttatggaggtggctaagtcatggtag

SEQ ID NO: 1043 - protein, 242 aa, Sulfolobus tokodaii
MNDEKPCYDLDVIRSIIKISGKIKNETPLRIGYGKSQSFTDPTDNPILKVNERPIIPGSSFKGALRSLAEAYVKSWNDPRYIVCDLDDNKCTSCNGEEKYCIPCIIFGFKDLSSRVYILDAVAEEYSISQRTMVTINRVFGGQLPGHLYTLDYVEPNSVFNFSMFLYNLNIVDGETEEWRKKAVEVVRYLLKTLITDGIFIGAKKSAGFGLVKLTSGEIEVRKSPDLMKSIKLDLMEVAKSW

SEQ ID NO: 1044 - DNA, 840 bp, Sulfolobus tokodaii
atggtagactatacctttatcagaaaggatgtaataaagagacaaaccgtaattgagggaattttagaggtacaatcccctctaaggataggagtcgggaaatttggtggaatggatcctgccagcattgctagagatacggtattaaaagacgctgaaggaactcctataattcccggatcttcttggaagggagtatttaggtctgaaggagagagagtattaaaaagaaggaatcttatcacatgtagcggtgtaggaagggattattgtttaaataactttagaaaatacgatgatttccagagaagcctaagagaaaactacattgaggatgcattaaaaacattctggaattatacttgtcttaattgtaaactcttcggtactatgagcgtaataggggctgttaagtttttagagtctagggctattgagtttaaactcggtactaggacaatggttgctataagtagaactgaaggagctgctgcaagaggcgctctggttcaagttgaatttgtagagcctgggtctaaattcacgtttaaaatcatcggaaataatttgcccaattatgcaataggttacttattaactattatgaagaacatccatgacggttttgtacaaataggtggacataagagtaggggattcggacttgtaaaattcgttaatttaaggttcttagacaaaggtgagaagaaaataggggatgaggatattccagtatcaatgcaagatgaaataaaggaagatggggataagtttttcgaaaagatgaaaccgttcatggaggcgtttaataatgcaaagattccatacccagtacactga

SEQ ID NO: 1045 - protein, 279 aa, Sulfolobus tokodaii
MVDYTFIRKDVIKRQTVIEGILEVQSPLRIGVGKFGGMDPASIARDTVLKDAEGTPIIPGSSWKGVFRSEGERVLKRRNLITCSGVGRDYCLNNFRKYDDFQRSLRENYIEDALKTFWNYTCLNCKLFGTMSVIGAVKFLESRAIEFKLGTRTMVAISRTEGAAARGALVQVEFVEPGSKFTFKIIGNNLPNYAIGYLLTIMKNIHDGFVQIGGHKSRGFGLVKFVNLRFLDKGEKKIGDEDIPVSMQDEIKEDGDKFFEKMKPFMEAFNNAKIPYPVH

SEQ ID NO: 1046 - DNA, 27 bp, Sulfolobus tokodaii
attacttttctcttatgagactagtac

SEQ ID NO: 1047 - DNA, 855 bp, Sulfolobus tokodaii
atgaatagttacttcagtaacgcgtatccggtttatatatttacagttacaaattctcatgttggtagtggatcctcagtaagtgaagaagtggatttaccatttcagagggatcatcttggataccctactatctatgcctccagcctaaagggagcgataaaatcataccttattaatactatttcagattccgaagaaaggaaaaacgtagaaatcctattcggcaaagattcaaccccagatgaagtatcgaaggtagtaatcctagatgcagttcttcttcttatccctgttagaataattccaatctctaaagactttgaaggagtttactcatatgctactacagaagagcttctggagacagctaagtcatatttggatgctgtaagtaatttattaagaactcagaatactgagaaaaatgttgactttttcctagctggtaatggggataaagagttaattgtgaacgagagctactttaaatttaaaaaagacgatgaactaaaaaagagttattctattttaattcctccagaaattaagagtgttatggtatttaggggcaatactggtagggatataattaacaggtctctaattagggttaggaggataaggatagatagagaaaagaagactgcgtctgaacgagggctatggagtgaagaatatgtaccgcgcgggacatactttttcactataattttagtaaggagtgataaagaaaagaatattaacgaaatattcaagaagtttaacgataaacttcttaattatattattattggaggtcatgagaccattggtaaaggaatagttagacttatgtggtggtcatatggttga

SEQ ID NO: 1048 - protein, 284 aa, Sulfolobus tokodaii
MNSYFSNAYPVYIFTVTNSHVGSGSSVSEEVDLPFQRDHLGYPTIYASSLKGAIKSYLINTISDSEERKNVEILFGKDSTPDEVSKVVILDAVLLLIPVRIIPISKDFEGVYSYATTEELLETAKSYLDAVSNLLRTQNTEKNVDFFLAGNGDKELIVNESYFKFKKDDELKKSYSILIPPEIKSVMVFRGNTGRDIINRSLIRVRRIRIDREKKTASERGLWSEEYVPRGTYFFTIILVRSDKEKNINEIFKKFNDKLLNYIIIGGHETIGKGIVRLMWWSYG

SEQ ID NO: 1049 - DNA, 492 bp, Sulfolobus tokodaii
atggttgagggggtaaagcttgctattagcatttttcctaaagttatattgcaacttaaagataatgaaacccttaagctctttagaagtagatgtagagactttccagaagaaacactaaatagtggttttgtgcccacttttctcttctatttatctaaatccgatctctgcacattagttaaatttgtgaattacctaaataatggtggttcggacattaaaataggtaatctcagaagtactgaaacttcttatacagtatattcagcattgattctctatttccttactaatgaagaactaaaggaaaagttcttaaaagaaattaaccttgatgaactatgccctaagaataatgttactcaaagtgcaaatgcactgatgcatctcttaaataatctatattctaactcgtctattgttactttgctgatgaaggattacctacttactctgaaaaggcttgcagaggcgttgataaatgtatga

SEQ ID NO: 1050 - protein, 163 aa, Sulfolobus tokodaii
MVEGVKLAISIFPKVILQLKDNETLKLFRSRCRDFPEETLNSGFVPTFLFYLSKSDLCTLVKFVNYLNNGGSDIKIGNLRSTETSYTVYSALILYFLTNEELKEKFLKEINLDELCPKNNVTQSANALMHLLNNLYSNSSIVTLLMKDYLLTLKRLAEALINV

SEQ ID NO: 1051 - DNA, 1434 bp, Sulfolobus tokodaii
atgtatgaagaagtaatgaatattgaagctaaggcattatatcccattgttggaggatataaccagtatccagtgagcttaaaagttggttatgaagagcccataaggtctactgagattaaagggctttggaaatggtggactaggattctaattgagagtgcgattgaaagaaaacggcatggtgtaacaaaatataatgaccttaataaattgcttgaagatttttttgggagcacgaactttaaatctcccattagagtcaggattgaaattgaagataactttatcactatttttaaagcaatctgggattttataataagaattcttgaaaatagaaaagttactgttaaatctgaaaacactcagaatttaaacatagctgacactataataattcctactatcaacattaatattggaaatagcactatctttaaaattactgagaataatcatgtgattagagttaagagagagaataaccccgaaaataatactcttaatataactctagatcttaacgcaaaaaaattaacagctaccctcaataacaatcaaattgaattaaaattaagagataaaacacttgataagtatttgcgtcttgataaattatctgactttctttcgattccgcgtattatgctagatttattgaaatacaataataaaggtgtaattgtaagcaatgaaataacctcaacagaatctgaaatcttagcagatataatcatggaaatacttactgccttcttaattcctaaagaaattaagtttcgtattattgttgaggttgataaggagagaattaataaagaaaagctgcgatttgcactttattctctacttatctttttaataatgggaggaatcgggagaatttcgaatagaggattaggctcactttctcctttatcactagagtgcaaagacaaggaattatgtggagatttacagtctaggtttgataactttaagagaatatctagagataaggagctttcagaatttattcggagactaataaatgaaacgatgtctatgttaaatgatgagataaccaagactattagaatggataaatataaggatatattcttcttctctgattcttcattaagatatatcttagctaagcaagtcaaggaacccattaaggccattaatatgctgggtaaagccacttcgttgcgtaatgttggaggtagaaatttcgcagaagaggtatttggaagcccaagaggttcaaacaaacaccgatccccgtcactcttcaggtttaaaattcttgaaatacaaggtaaatattatttattacaatattttctggataaatatgataaaaataaaaaacgactgattgataaatataaaaataaaataaatgaatttattaataaaattaaaatttcggaggatgtgacataa

SEQ ID NO: 1052 - protein, 477 aa, Sulfolobus tokodaii
MYEEVMNIEAKALYPIVGGYNQYPVSLKVGYEEPIRSTEIKGLWKWWTRILIESAIERKRHGVTKYNDLNKLLEDFFGSTNFKSPIRVRIEIEDNFITIFKAIWDFIIRILENRKVTVKSENTQNLNIADTIIIPTININIGNSTIFKITENNHVIRVKRENNPENNTLNITLDLNAKKLTATLNNNQIELKLRDKTLDKYLRLDKLSDFLSIPRIMLDLLKYNNKGVIVSNEITSTESEILADIIMEILTAFLIPKEIKFRIIVEVDKERINKEKLRFALYSLLIFLIMGGIGRISNRGLGSLSPLSLECKDKELCGDLQSRFDNFKRISRDKELSEFIRRLINETMSMLNDEITKTIRMDKYKDIFFFSDSSLRYILAKQVKEPIKAINMLGKATSLRNVGGRNFAEEVFGSPRGSNKHRSPSLFRFKILEIQGKYYLLQYFLDKYDKNKKRLIDKYKNKINEFINKIKISEDVT

SEQ ID NO: 1053 - DNA, 891 bp, Sulfolobus tokodaii
atggatttgtataaaattcttaatatgattgataaaaattatttttcaccaaataataaaaatcgactcggaaagacaaatctttattcattactacaacttgagggcatactagttagcatgctgagaatgtacagtgaacataaaatagaccaactacgagacttgcctatttctgagatttataaaagctatataaagtttaaggataataatcagaataattacgagacctataagatagaagaaatatatgataccaagaagagacatatagctgaattactttcgattatgtataatccaggttttgaaattgtaaataagatgatggaagagattaaatcggcattgcgtgaaatgaactataagtttattgaagttagaataaagacctcatcaaagacacttgttggtgtctcaactaatttcggatatacgatctttgagaacggtatctcatttgatccttatttaaatgtaccttatatcccagcatcagaaattaaagggttgttaagaagtatgacagatgatgagaaattagcggataaattattcggtagtgaagaatctgaagggattttgatgataactgattcatatcccatacaagcagaggggagtattttcttacccgatataataacgccccactacgttaatgctgaagatgagtcaagagtacagcctaaaccctccattaggtttgtaatagcacctaaagtaacttttgattttttcatttactataaaaatctggatacatatttaaggaaagttttagagcaattaattattaaaatgataaaagagggtataggtagtaagacgtctctaggttattccttgtttacagtagtttacatagactggacttacggtgagtaa

SEQ ID NO: 1054 - protein, 296 aa, Sulfolobus tokodaii
MDLYKILNMIDKNYFSPNNKNRLGKTNLYSLLQLEGILVSMLRMYSEHKIDQLRDLPISEIYKSYIKFKDNNQNNYETYKIEEIYDTKKRHIAELLSIMYNPGFEIVNKMMEEIKSALREMNYKFIEVRIKTSSKTLVGVSTNFGYTIFENGISFDPYLNVPYIPASEIKGLLRSMTDDEKLADKLFGSEESEGILMITDSYPIQAEGSIFLPDIITPHYVNAEDESRVQPKPSIRFVIAPKVTFDFFIYYKNLDTYLRKVLEQLIIKMIKEGIGSKTSLGYSLFTVVYIDWTYGE

SEQ ID NO: 1055 - DNA, 2997 bp, Sulfolobus tokodaii
gtgagtaaaatgagtctcaaacccatgagtgaaataattaaagagaaatttgcagcattattacatgatcctcctaataaaccgtttatatttagccttaatgcttttaatgaggaaaaaagaattagccacgtaaaagtggcaaaaacattaatatctcatctagattttttaggaaaaaatgaattagatgagataagctcaaagatttatagtaaaaaagagaagggctgtaatagtaaagtatctgatgctgatagtctagctagtaagtttgataggtatttaaccactttgatataccaagaacgaggaagaaaacaacaagcaatgtttgcgaattttaaggagattgtaatgaaaaattttctagcaccagagttagaagtgaacttatctgctattcctagtgacgcttatcatgacccctctggtaaggatattaaggaattctttaattatctgtcagaggtatttaaaaagctaggtttaactggcgttagcatagaaacttataacgtcttctatttcttttacgaatttctttgggttgctaaaggttacactgtaggtcctgcagacactagagttcctactcactcaatctttgatcatttatatgctactgcctcaataataaactggttcttaggatcaacagatcttcttttaggcttagatatagtgggtgttgcggactatattaacaagtccagaaagctcagagatttatgggcatcaagttatctagtatcggctctaatctggtatgtcttaattagtttcgttgaaaaatttggagcagattctgtgttatttccgtctttgaggtttaatccgttcttcgcaacttatatttatcataaatatctcaaaaataaagagaaagacgaattaattaaagagattgtaaactatattacaacatatatatttaacggtgatgagacctacaaaaaacttggaataccaccatatcctattatccccgctagagctacactaatattgcttggagtaaaatacgttagtagagaactaggtctcaaaaaatcggatatatcatgtattgaaaaatatgtaattactaggtttaatgagggctggggtagacttattgatcatctaattacgtatgcactatctcatactgataatcccttctgggcattatttaataaagtcatagagaaagagagtgtaaaaaacgccgtcaagattcctcctgtgcaattacgagtaattactttaaaaaaagaaaacgaagtgtcgaattatgaagagtttgataatagatatagagagctagtctcaaactttaagagaaagaaactttctaaagtatctcctcacactcaactttcaaactataattattatattgattcaatcggtgagactaaaagaggatttgaatactgtagtatttgcggagtccttcctgcaatgcttattctaccaaaggacgaaaatgagtataaaaaattcgtagaagagcacactggaaagcagtttaacgatgatcaaatcgaagctctcaaggctatactatctcctggagaaaagctttgtccttggtgtttaataaaacgtgctataggagtaagaccggaattcctcagagtactcataaccagtgaggacttaagaagttttgaagagaaagatgtttttataccctctgtcagccatgtggcattttacaaaaaatttgaaaaacttaaagaagataatataataaatccagataaagaaaacactatatctctttggaagtattatgaaacctaccctattgagaaaagaggtctattaagagaaaacccagaagaaaagggatggaaagatgtatcgccttattatgctcttgtaagggctgatactgattacttaggtgacttgcttgaaggaaaagtgactccatatctagctggaattatagactcaagtttttacggaggtgaaagagaaaatgagagtaaagtcaaaaacgctattacaaggtacttacgaaatgctgcaaaaggtctatatcaagaagtgattaatgatgttcttaaagaagatataaatcaagcaaaagagttaataaaaaatgccgctgtaactgctgaaattgagattaatgataacgatatagaaagaataatcagtgatctgaaagactttctcaataaaaacgtagatcgtgatagacttctattgtttccatcatggcatgtaagtattagtagtatgcttaatagaattctccttaaggaaattcagcttgtaaacgctttaggaggatttgtagtgtatgctggtggtgatgatttactcgcaatacttccagtagaaaacgccttacagtttgttgagaacagtcgcaaaatagtagctggcattgaggatgcctcaagctataaaggctttattaagattaacaattcgtactttagtcaactaccactagttggacgtagttatatactatacttctcccacgtcaaatatcctcttcagttagctcttgaagagtcttataacttattagaagaagggaaagagagagtaaaatatgataagtacaaaaaggatattgtaatatttaaatatagaaattctgtcagttttatccctttatcacttataagaccatatgaagagaataatgataattccataaaaagatatctcgataacttaggtaaaagcctagagttattacgtattctctatgatgctattaggcaaaagaaattgtctaagagtctgatctatgatgcgttagcagatacaattcttaaaagcagagagctagaaagtgaaatattagtaaaatatttagattatttggtcgataaaaataagatagataaatccttctcactaagctttgtaaattatcaagatatccttaagatttcgatcataaatggagaaacatctgaacccttaacttataatttatttaaagctctaagcattatattaggggctgaaaaaattgagtaa

SEQ ID NO: 1056 - protein, 998 aa, Sulfolobus tokodaii
MSKMSLKPMSEIIKEKFAALLHDPPNKPFIFSLNAFNEEKRISHVKVAKTLISHLDFLGKNELDEISSKIYSKKEKGCNSKVSDADSLASKFDRYLTTLIYQERGRKQQAMFANFKEIVMKNFLAPELEVNLSAIPSDAYHDPSGKDIKEFFNYLSEVFKKLGLTGVSIETYNVFYFFYEFLWVAKGYTVGPADTRVPTHSIFDHLYATASIINWFLGSTDLLLGLDIVGVADYINKSRKLRDLWASSYLVSALIWYVLISFVEKFGADSVLFPSLRFNPFFATYIYHKYLKNKEKDELIKEIVNYITTYIFNGDETYKKLGIPPYPIIPARATLILLGVKYVSRELGLKKSDISCIEKYVITRFNEGWGRLIDHLITYALSHTDNPFWALFNKVIEKESVKNAVKIPPVQLRVITLKKENEVSNYEEFDNRYRELVSNFKRKKLSKVSPHTQLSNYNYYIDSIGETKRGFEYCSICGVLPAMLILPKDENEYKKFVEEHTGKQFNDDQIEALKAILSPGEKLCPWCLIKRAIGVRPEFLRVLITSEDLRSFEEKDVFIPSVSHVAFYKKFEKLKEDNIINPDKENTISLWKYYETYPIEKRGLLRENPEEKGWKDVSPYYALVRADTDYLGDLLEGKVTPYLAGIIDSSFYGGERENESKVKNAITRYLRNAAKGLYQEVINDVLKEDINQAKELIKNAAVTAEIEINDNDIERIISDLKDFLNKNVDRDRLLLFPSWHVSISSMLNRILLKEIQLVNALGGFVVYAGGDDLLAILPVENALQFVENSRKIVAGIEDASSYKGFIKINNSYFSQLPLVGRSYILYFSHVKYPLQLALEESYNLLEEGKERVKYDKYKKDIVIFKYRNSVSFIPLSLIRPYEENNDNSIKRYLDNLGKSLELLRILYDAIRQKKLSKSLIYDALADTILKSRELESEILVKYLDYLVDKNKIDKSFSLSFVNYQDILKISIINGETSEPLTYNLFKALSIILGAEKIE

SEQ ID NO: 1057 - DNA, 858 bp, Sulfolobus tokodaii
atgttgcggtcttctggagaatttgacatagaaactaaaggtccagcttcttatgcaaaatccttattagttccaagaccttcaactattgctggaatgttagcatcactactctataaaggttcgaacaaggattattggttagatgatattaagcaaaacattaagcctataagtgatatttgcggccctttaattgttaaagataattatggttatgtcccgttaagaataggaagtgtattcacgtttttaaaggcccctttaaaagaattatctaaatgcatttcggataagatatctgatataatttcattttatgaggataaaggagaagactatgacaagatagacactaagataagtaagcttatgagtcaagattggacagatattatagctatacagcccagactaggaataggacttgatagaagtagaaaagttaccaaagaaggtatgctttatgtggctaactacgtttcaataaatgcaagtatctacgttattgtaaatggtgattcaaaagagataaaaagtgctttagacggtaagatatcaacgtttggtggtgaaggaagactagttaaattgcatatacttgatgatgaagcttttagttgtgacaaatttgaagatagcaaaccgggagttttactttctccacttccagtagaatctgctacaagatttataggagaattcagcatcataggtatgggatttgacctcaaaaataatagaagaaaagaaatagtaaaggctatccttgaaggtagtatagtaataaattctattccgattaacgaatattatagtataggatatggtagttatgttaggatttttaccaaataa

SEQ ID NO: 1058 - protein, 285 aa, Sulfolobus tokodaii
MLRSSGEFDIETKGPASYAKSLLVPRPSTIAGMLASLLYKGSNKDYWLDDIKQNIKPISDICGPLIVKDNYGYVPLRIGSVFTFLKAPLKELSKCISDKISDIISFYEDKGEDYDKIDTKISKLMSQDWTDIIAIQPRLGIGLDRSRKVTKEGMLYVANYVSINASIYVIVNGDSKEIKSALDGKISTFGGEGRLVKLHILDDEAFSCDKFEDSKPGVLLSPLPVESATRFIGEFSIIGMGFDLKNNRRKEIVKAILEGSIVINSIPINEYYSIGYGSYVRIFTK

SEQ ID NO: 1059 - DNA, 29 bp, Sulfurihydrogenibium sp
ctttataacccacacggttcagatgtaac

SEQ ID NO: 1060 - DNA, 897 bp, Sulfurihydrogenibium sp
atggaggaagctatttttaaagtagaaatcataactccaaccatcatgggcggagcaaatagtggaaaattagactctatttttataagaccaacagaaataaaatctacaatgagacaggcttttagattagttgccggcaagtatgtaaggcacgataatgaaagagttgaagatttatacaaattagaaagcgaagtttttggtaatacagaaggaaaaggaaagtttagattgattgttgatattccaaacaatctaaaaactgaaaaaatcaaattacttccacataaaaatgatttttctaaacttgccatattgccaaaccaaacttttgatttaaaaatcatttcttacaaatatccggtagaattctataaagcactgataaacattgcttttctgcttggagtaggacatagaagaaacagactatttggaaatatgcagatagaacaatttaaattaccggatgaagtaggaaaaattgataaattctttttagatgaaggatataaagaaataaaaacagacaaccctttatttgcttgtttttctaaaagagaagatggcgataatagaaatttttcagtttttggtatgcctctaaaagatgaatatataccaataaataaacaaaattttgaaaaagctttagaaaatctctacgaaaaagtaatccatggaataaaaggagaaaagttagactttattcttgggggagtaaatccaagaagacaagcatctttcgtaaacttttctattttaaaagttggtcaatcttacagattgtttgttattggcttttattacaagaatgaaaaatttaaatataatgattggaaaaatgcaatagaaaaagctaaagaactaacagaaaaacttttaaaaaaataa

SEQ ID NO: 1061 - protein, 298 aa, Sulfurihydrogenibium sp
MEEAIFKVEIITPTIMGGANSGKLDSIFIRPTEIKSTMRQAFRLVAGKYVRHDNERVEDLYKLESEVFGNTEGKGKFRLIVDIPNNLKTEKIKLLPHKNDFSKLAILPNQTFDLKIISYKYPVEFYKALINIAFLLGVGHRRNRLFGNMQIEQFKLPDEVGKIDKFFLDEGYKEIKTDNPLFACFSKREDGDNRNFSVFGMPLKDEYIPINKQNFEKALENLYEKVIHGIKGEKLDFILGGVNPRRQASFVNFSILKVGQSYRLFVIGFYYKNEKFKYNDWKNAIEKAKELTEKLLKK

SEQ ID NO: 1062 - DNA, 1710 bp, Sulfurihydrogenibium sp
atggctaagtatttagtaaaaataaccattccatctatacaagatacaattgtaaggtcaagaaaacttaaagatttgacaggtggtagtgagcttattccaaggattatgcaatcaggattaaagtctcttgaaaatgatgacaaagtagagtttataattccaacagctgatgttgtaaaagaagatagcctaaacataacaaacgtagcatatcttacaatagaaggagagaaagagcaggtaatcgaaaaagttaaacgcataaaagaagaaatgttaaaagaattaaacactcttgaagaagcggttagacgtaaaatttcagataatgaagaatttaataagtataaagatttaattgcctatcaaatcagaaatgctatcaatatagtttgggctattagtgagattaaagataacgatattgtaaaagcaaaaaatgatgtagatattgcagtagctaatgcaaaatcatcaatagaacctgatgataaatttattgaaggatttaatctttttcaaaagcaaaagaatcagtattcagcttttgaaaattatcaagattttatggaaaaagcatatcaaatcaatccagagcttataagaggagcttatctttgtgatgtatgtggaaaaagagtaatacttggagcaacaaaaaataactttaaaagctcaatcacagaaaaagatgaagatgacagactctgcgcattttgttatgcaaagagacattatcatggagaacataaaaaatccgttgttgatgtagctttaaaaaaatatcttgcagaacatgaaagtagaatacaagaaatctttaaaaatcatggaaaagcagacttatttgaaaaagacaaacaaaacatatacatagaggtattggaaaataacaaagaagaccaagctttgattgaatctttaaaaaaattatacaaagaaattggcaaaaaaccacctgtttattatgccatcgttgtaatggatggggactcaatgggagaaaaaatatcaaaagcatttgaagagaataagattatagatataactgaaaagttatcagaatttagtaaagaggttaaaggtatagtagaaaaatactccggaatggctgtatactcgggtggtgatgatgttttagcattgttcccgttagaaacggctctaaaaggatatatggaaataataagtcaatttaaagataaatttaaagatatgaaagatacagaatataactttacagcaagcgcaggtttggtaatatcccattacaaaatacctcttagctatgtattacaagaagcaaggtctgcagaaagcaaagctaaaaaagttgatggaaaggatgcagtatgcataaaatacataaaacactcgttctcatcagcagaagcaccgataaaaaacgatcatttacaattatttaaagagctaataagctttctatccgatgaagattttccgtttggttttatctatcaactgcaagagcttttacttccatacctaccaaaaacagaagatgaagaacctgttaaagagctaacaaaatatctaattgataagaagccttacaagagaaaaaaagagtttattgattttatgttaaacgcccacattaatgataagaagttttttgacttcaaagaaccggaaaaaataatcaacactttaaaagtagctaaatttatagcaagtggggtgtaa

SEQ ID NO: 1063 - protein, 569 aa, Sulfurihydrogenibium sp
MAKYLVKITIPSIQDTIVRSRKLKDLTGGSELIPRIMQSGLKSLENDDKVEFIIPTADVVKEDSLNITNVAYLTIEGEKEQVIEKVKRIKEEMLKELNTLEEAVRRKISDNEEFNKYKDLIAYQIRNAINIVWAISEIKDNDIVKAKNDVDIAVANAKSSIEPDDKFIEGFNLFQKQKNQYSAFENYQDFMEKAYQINPELIRGAYLCDVCGKRVILGATKNNFKSSITEKDEDDRLCAFCYAKRHYHGEHKKSVVDVALKKYLAEHESRIQEIFKNHGKADLFEKDKQNIYIEVLENNKEDQALIESLKKLYKEIGKKPPVYYAIVVMDGDSMGEKISKAFEENKIIDITEKLSEFSKEVKGIVEKYSGMAVYSGGDDVLALFPLETALKGYMEIISQFKDKFKDMKDTEYNFTASAGLVISHYKIPLSYVLQEARSAESKAKKVDGKDAVCIKYIKHSFSSAEAPIKNDHLQLFKELISFLSDEDFPFGFIYQLQELLLPYLPKTEDEEPVKELTKYLIDKKPYKRKKEFIDFMLNAHINDKKFFDFKEPEKIINTLKVAKFIASGV

SEQ ID NO: 1064 - DNA, 1011 bp, Sulfurihydrogenibium sp
atgataggaattaaaccgtttgatgtattaacctttggagatggaaagccgtttaatgcaacagaaagagtttttagagaatcagatttctttataaatccaatcccggttgtcagcggactaaacaaagccacgggtaaaaaactaaacttagagtttatatcccttgcaaaaggagaaaatctatactttaaagcaccaatagatataaaagtcgcaaatagcagagtaatcaaaccggttgtcagaaaacttgacaatgtaattacagaagaaaatttagaatattttttagattatcaaaccagcgagaagatggaggatttaaacggctatttaaaagatgaggagtatataaaatacttaaaagacgaagaaatgtcggttaatacagagcttttaagaccacataaagaattaagaacaggtatagcaatagatagaagcacgagaaccacaaaggaagggtacttatttactcaaacatttaacagatttgaagaagatgtttatttttatgtaaaaccatctaaagatttaaatatcgatactgtaatcattggcggagaaagtaggctatcggtcgtaattaaaaaagacagggatttaacagaaagacttttaaaagaaaaggaaaatataaagaacattgtcagaaagacaggatttttcaagttaatattactatcacctacaaacaaggtattagaaatagaaggagcaaaaatcatagctaaggttttaggaaaaccatttatttacagcagttggataaaattgccaaatgacaaaacaggatttccaagcagaatatttagactaattcctgaaggttcggttgtttactacaaagtagaagaccaaagcaaaattgatgaaatatttgataaatactatctaaagccggcttattatgagcttgaatatccatactttgatactaaaaatccaacaggatttggattaagcataataggagctttaaatttaaataaaggaggtcaaggataa

SEQ ID NO: 1065 - protein, 336 aa, Sulfurihydrogenibium sp
MIGIKPFDVLTFGDGKPFNATERVFRESDFFINPIPVVSGLNKATGKKLNLEFISLAKGENLYFKAPIDIKVANSRVIKPVVRKLDNVITEENLEYFLDYQTSEKMEDLNGYLKDEEYIKYLKDEEMSVNTELLRPHKELRTGIAIDRSTRTTKEGYLFTQTFNRFEEDVYFYVKPSKDLNIDTVIIGGESRLSVVIKKDRDLTERLLKEKENIKNIVRKTGFFKLILLSPTNKVLEIEGAKIIAKVLGKPFIYSSWIKLPNDKTGFPSRIFRLIPEGSVVYYKVEDQSKIDEIFDKYYLKPAYYELEYPYFDTKNPTGFGLSIIGALNLNKGGQG

SEQ ID NO: 1066 - DNA, 777 bp, Sulfurihydrogenibium sp
atgaaaaaagttttctatcatgttttaacaccaatgcacataggcagtggaacaacgttaagtttaatagacttaccaatacaaagagaagcacatacagattttccggtgatgccatcatcagcaatcaaaggtgttataagagcttcatttaacgagcaagaacaagaagatatctttggaaaaggagatgaagaaggaaaagtcatatttacagatggaaagattcttttgtttccggtaaaatctctaaaaggcgtttttgtatggataacttctccttacgttctcgaaaggttcaaaagagatacagaaataaacgtcgaaattccaaaagtagaaaaagacaatgcggtagtatcttcaaataaagtcctgatgaataataacaagcttgttttagaggaatttacatttaatgccacaataaacgaaaatctaaaaaaactcaaagaaatcacaaaatgcgaaatagatgaagacaaaatagcagtagtaagcgatgatgtatttaaattttttgttaaaaactatacagaagtaaacgcaagaattaaaatcgaccaaacgaaaggaacagttgataaaggtggactatggtacgaggagttattacctgcagaaacagtgttctacgggtgtatagatgcaagaaaaaaatctgaacatgaagaacagctaaataaagtaatagaaaaaataaacaatcaaatccttcaatttggaggagatgagaccttaggaagaggatttacaaaaatagtaatggaggcgtaa

SEQ ID NO: 1067 - protein, 258 aa, Sulfurihydrogenibium sp
MKKVFYHVLTPMHIGSGTTLSLIDLPIQREAHTDFPVMPSSAIKGVIRASFNEQEQEDIFGKGDEEGKVIFTDGKILLFPVKSLKGVFVWITSPYVLERFKRDTEINVEIPKVEKDNAVVSSNKVLMNNNKLVLEEFTFNATINENLKKLKEITKCEIDEDKIAVVSDDVFKFFVKNYTEVNARIKIDQTKGTVDKGGLWYEELLPAETVFYGCIDARKKSEHEEQLNKVIEKINNQILQFGGDETLGRGFTKIVMEA

SEQ ID NO: 1068 - DNA, 414 bp, Sulfurihydrogenibium sp
atgaaaacattagaacaagagagaagtaattatgcttttgaatgtgtttctaagataaaaggtaaaccttttgaaaaagatgcaagctcgttaatatctaagcttggcacacttattttaacaaacggacttggaaatactttagcttttttatttgcaaaaggaaaagaccatcatcttgaagttatagcgattatttcaaattggttgtttagacaagaaggtcaaaaagaacccggttttaagagagataatgtaaaagttaaaattgaagaaataatgaaaaaactcgttcttgatgcaagcgttgagcagtatatgtactatacagaggaaactttaagacttgtaaattggttaagaagattttctgatgcgattttagagtccggaggcgaaaatgaacaaggataa

SEQ ID NO: 1069 - protein, 137 aa, Sulfurihydrogenibium sp
MKTLEQERSNYAFECVSKIKGKPFEKDASSLISKLGTLILTNGLGNTLAFLFAKGKDHHLEVIAIISNWLFRQEGQKEPGFKRDNVKVKIEEIMKKLVLDASVEQYMYYTEETLRLVNWLRRFSDAILESGGENEQG

SEQ ID NO: 1070 - DNA, 834 bp, Sulfurihydrogenibium sp
atgaacaaggataaacataatccaggacaagatgcaatattagttattccaaaaggaaatgatataaaactttcattaaaaagtgcatcaaatttaaagttgattttagaaaagtatatcccattttataatatgcaaaacaaaaggatgcttgatatatctaaagctaaagaaaaggtttacgaattaaagccaaaaaatttccaagaagctgacaattatataaaaaaactaaatgaaaggcaaagacagatagcagataaaagctttacgcttactacaaaatcaagattgatagttggacttggcggtggttctgctttggaagtttctattaaattacattttatttacggttttccttacattccatcaagcgcaattaaaggcgttttaagggcttataagattttaaaaaaggtaaattttgattttgaaaagtattcagatcttgaaaaaaggattgaaagcggagatggagaagacaaagagataggagcgtttgtaagggtttttggaaatcagcaatacaaaggagatttaatcattcttgatgctattccagaaaactttccaagattagatgaagatatcatgaatccacattatccaaaatattacaatgataaagagccaccaactgatgaccaaaatccaaatcctataaaattcttaacagtagcaaagggagaaaaatttaacttctattttaaaaacagtgaggtttataaagaagcttttaaaacagatttaaaagaagatttaatacaagcgtttaactatcttggcattggagcaaaaaccggcataggttatggagtgttagatgggtaa

SEQ ID NO: 1071 - protein, 277 aa, Sulfurihydrogenibium sp
MNKDKHNPGQDAILVIPKGNDIKLSLKSASNLKLILEKYIPFYNMQNKRMLDISKAKEKVYELKPKNFQEADNYIKKLNERQRQIADKSFTLTTKSRLIVGLGGGSALEVSIKLHFIYGFPYIPSSAIKGVLRAYKILKKVNFDFEKYSDLEKRIESGDGEDKEIGAFVRVFGNQQYKGDLIILDAIPENFPRLDEDIMNPHYPKYYNDKEPPTDDQNPNPIKFLTVAKGEKFNFYFKNSEVYKEAFKTDLKEDLIQAFNYLGIGAKTGIGYGVLDG

SEQ ID NO: 1072 - DNA, 37 bp, Synechococcus sp
gtttccgtccccttgcggggaaaaggtagggatcaac

SEQ ID NO: 1073 - DNA, 852 bp, Synechococcus sp
atgttcgacgttttcaaaaaccgcttggaaatcaccggcaccctcaccaccgtgaccgctctgcacatcggggtgggccgctccaccgaacccatcggctcggatttgccggttctcaaggatgcgctgggccgtccgctcattcccggctccagtttgaagggggcgatgcgctctcgcctggaaagtttcttgcggggcatcaacccagagctggccagggatcccggcgaattgaccagcagcgagcaatttcagatcatcaaccaaattaaaaatgactacaaaggggacgatgcggctctgactcaaaagctcattgaggccaccgactgggtctcgcaggtgtttggatccccttggttggccggcaaggtgcagatccgagatttgcccgtggtgccggaagcctggtttggccagtaccaagagcgggatggcgtggccatcgatcgggatacggaaacggcggcagatggcaagctgtacgacttgcaagtggtgcctgccagcacccccttccggtttcatgccgtcgtcgaaaatgccgaggaatgggaactgggcctcttggccattggcctgcaccaattggaaacggaacagatccccctgggaggggggcgctcccgtggcttgggggttgtccgcctgcagatctcggcaatctattggttcgactcggaaggggatccaagacggctgctggcctaccttcaagagctggtggccggatcccgacagccgctcagcccggagcaggctgccgctttgcgccaagactgggtggaagccctggttgccaaattaacaacggcctctcaacggcaatcggtcggcccccgccgctag

SEQ ID NO: 1074 - protein, 283 aa, Synechococcus sp
MFDVFKNRLEITGTLTTVTALHIGVGRSTEPIGSDLPVLKDALGRPLIPGSSLKGAMRSRLESFLRGINPELARDPGELTSSEQFQIINQIKNDYKGDDAALTQKLIEATDWVSQVFGSPWLAGKVQIRDLPVVPEAWFGQYQERDGVAIDRDTETAADGKLYDLQVVPASTPFRFHAVVENAEEWELGLLAIGLHQLETEQIPLGGGRSRGLGVVRLQISAIYWFDSEGDPRRLLAYLQELVAGSRQPLSPEQAAALRQDWVEALVAKLTTASQRQSVGPRR

SEQ ID NO: 1075 - DNA, 648 bp, Synechococcus sp
gtgacctacagcagttttacccttgagagagccatttcgacctttcagctcaggtcaagaatcatccatggcctgtttgcagaggttccactgactgagtgctccgattacttgaaaataaccctagatcgctatctcggcttggccacctcggtcaacagcgaaaaagcccgctccgagtttatcatcgcccctgtgctgggagaggtgaagtacctatgtcgggatcaaatctcgctgttttccggcaaggaattcaacgtggatcccgagagggggttggtgggcctatgcgactacatcatttgcctatcccctctccaactctacattcaagatccggtggtgattatcgttgaggccaaaaaagaagacttgatcgggggtctgggccagtgcgttgccggtatggtgggggcacaggtctttaacaagaactccaattctcaagtagacagtgtctatggagcagtaacctcaggaaccaactggcgatttgcaaaactcgagggtgaccaactctttatcgatgacagggagtactttatctcagaaattgctcagatcctagggatcctcttgagttttattaagggctccgtctcgcttcgggaatggcaaacctctgcagtacaagccttaacttga

SEQ ID NO: 1076 - protein, 215 aa, Synechococcus sp
MTYSSFTLERAISTFQLRSRIIHGLFAEVPLTECSDYLKITLDRYLGLATSVNSEKARSEFIIAPVLGEVKYLCRDQISLFSGKEFNVDPERGLVGLCDYIICLSPLQLYIQDPVVIIVEAKKEDLIGGLGQCVAGMVGAQVFNKNSNSQVDSVYGAVTSGTNWRFAKLEGDQLFIDDREYFISEIAQILGILLSFIKGSVSLREWQTSAVQALT

SEQ ID NO: 1077 - DNA, 441 bp, Synechococcus sp
atgaccttcgccaccagcgagatcacatcggaacaagagctcaagatccaacggcaaatccggctggccgaagatgatctggtcgccagaattcaagccgccttggataacttcagaggtctcaacagattggaagaggcccaatatcgcaacctattgcacgtggcagcttccaccgaaagctcagaggtgatcaagaactttttgcgctaccaggtggggcgcggtgacaagtgggggcggggcaaagactctttggcagaagccatcatcaaagacatcgacaactggattcatcaaagggctatagccatcgccagggaagccggaattgaaagagcatcccccaaagtcaacgagatcaaaattgacttgattcggcgctacctgggctatggggcccgctacctcaagtacaagcgagagggaggaggatcctag

SEQ ID NO: 1078 - protein, 146 aa, Synechococcus sp
MTFATSEITSEQELKIQRQIRLAEDDLVARIQAALDNFRGLNRLEEAQYRNLLHVAASTESSEVIKNFLRYQVGRGDKWGRGKDSLAEAIIKDIDNWIHQRAIAIAREAGIERASPKVNEIKIDLIRRYLGYGARYLKYKREGGGS

SEQ ID NO: 1079 - DNA, 1233 bp, Synechococcus sp
atggaagccattcaactcaccctaacggctcagtctcccttggccatcggtcggcaaaagccgggcggctccatcagcgaggcccaggattacattcccggcagcgtgattcgcggtgctctggccgacctcatgctcagccaaacccaacatcgccctgccgaggcgctggaaggagatttggccgccctgtttacggcagctcggcctgctgtgtttacccacgcctatccgggatccggcagcaaggtcttgccggccacggccttcagctcgaaaaacaatcccggcttccgctcagaggcgggcaaaacgggggtgttcgacacgctcctggatcgcttctgctcacagcggctggggatcccgttcgatcccacagagccggacggttccgggggaagagtggagcccttcggggggttctacagccagcaggagtctgacctggggccccgctacgaacgagctgctgtgtccaaacgcctgctcacgcgggtggggatcaaccgtcgccgcgccactgctgccgaccaaatcctctacagcctagaggtgatgaacgagggcaaagcccgccccaatgggcatctggagcgctcccttttcagcggctacatctacctgcgggatcccaagctggccgagaccctcacccgctacctcaacgcccacgcccacctgctgcgcttgggaggaggggtgtcgcggggattgggccgggtcaacgtcacggctcggtgtctggctgctccccggccttccctggcccagcgggtggaagccttcaaccaaaagctgcggcagcgctggcaacaatggcaggtgttcggggatccctggcagccccttccgccggagcggcagtatttctccatcgggctgcagtcgggggccatcctcaaggagcgctggcaacgcaccacggtgctcacgccgccgatgctccaggaggaggccaactgcgaggacggatccctggtcttggagctggcctgtagcagctacgcctatgtctccggctggaacgccgcctggggtctgttcaaagatgtagaattggtaaccacgcagggcagtgtctttctgctgagcaccacgcaactggagcgttggatcccgattttggcggagatggaatactgggggattggcgaacgcactgctgaaggattcggccaaatcgaagtttgcagtccgttccatcatcatttctgggagaacccgctatga

SEQ ID NO: 1080 - protein, 410 aa, Synechococcus sp
MEAIQLTLTAQSPLAIGRQKPGGSISEAQDYIPGSVIRGALADLMLSQTQHRPAEALEGDLAALFTAARPAVFTHAYPGSGSKVLPATAFSSKNNPGFRSEAGKTGVFDTLLDRFCSQRLGIPFDPTEPDGSGGRVEPFGGFYSQQESDLGPRYERAAVSKRLLTRVGINRRRATAADQILYSLEVMNEGKARPNGHLERSLFSGYIYLRDPKLAETLTRYLNAHAHLLRLGGGVSRGLGRVNVTARCLAAPRPSLAQRVEAFNQKLRQRWQQWQVFGDPWQPLPPERQYFSIGLQSGAILKERWQRTTVLTPPMLQEEANCEDGSLVLELACSSYAYVSGWNAAWGLFKDVELVTTQGSVFLLSTTQLERWIPILAEMEYWGIGERTAEGFGQIEVCSPFHHHFWENPL

SEQ ID NO: 1081 - DNA, 723 bp, Synechococcus sp
atggtgagactggcagagctgccccaagcggggcgaacgatcacctctatccctttgagggccaccctcgcctctgccctggcggtgggagccggcggctccagcggctccctggcggataagcccctgctcaaagatgcctttggcaggctgatcattcccggctcccaactgaaggggcggctgcgccacgagtgcgagaaactggcccgtggcctgggctgggccatttgccgctctcccgacccagagcgcatgtgtccgcagcgggagggcagcgcaggaaatttccaccgccccgaataccaggtggagggctacgccggatcccattgtctggtctgccagatattcggcaatccggccctgcctgcccgcctgtgggtggaggatctcgtctgcgaggtgccgccagcagctctggaaccaacccttcgccctggggtcaccctcaaccgccgccgccgcaccgccgaggatcagcggctctacctcattgagacctctcccgcggctgagctgactttttccggatccctgcagcttttgcccgattgcccttcctggggcaaaactctcctgttggcggccctgcaccacctgatcgcgctggggggcagcaaatccgcaggtttgggctggctgcactgggatcctggatccctgcaggctctccagcccaccgcagccgattgggctttcttggcccagggagggagctga

SEQ ID NO: 1082 - protein, 240 aa, Synechococcus sp
MVRLAELPQAGRTITSIPLRATLASALAVGAGGSSGSLADKPLLKDAFGRLIIPGSQLKGRLRHECEKLARGLGWAICRSPDPERMCPQREGSAGNFHRPEYQVEGYAGSHCLVCQIFGNPALPARLWVEDLVCEVPPAALEPTLRPGVTLNRRRRTAEDQRLYLIETSPAAELTFSGSLQLLPDCPSWGKTLLLAALHHLIALGGSKSAGLGWLHWDPGSLQALQPTAADWAFLAQGGS

SEQ ID NO: 1083 - DNA, 2211 bp, Synechococcus sp
atgcgggccgccgttcgcgccgacaacgaggccgggatcccagaagagctacggcccattttggctcaggtgcgccaatttcaggagagcatggcggcgaagacctttcccagaaccccggcggagctgcaatcccgctacccggagctgtggcagcagacaacccgcatcggcttggtttacgggggggccaccaagatcaagagctatgtcttcgagtcggccaagctgtcggaaatccgcggggcctccgctttgttggatcgcattaacctggtggatctgcccgcctttttcggggatcccgagcaaacctacctgggatgggaaggtttggggaaagagtctcaagcagagctgagggcctatgtggccgagcagatccggccttggctgcagcagcactacccggctttggcgcaagccctgatcccggagctcatcatctactccaccgggggcaatctcctggccttttgcccggcggcccatgtggacgatctctgtgaggccatcgagcggcgctacaccgaagaaaccctcaccgctaacgcctgcgccgtgggatccgcctttcggctgctggaactgcgctacggcctgttgcgggatcccatcgaacgcaccccctggctggattggctggcgcaacacaaaacccatcccctggtgagagcctattttggggatggcagcgaagccagatttcaagaccgcaaaagtttcaacgagttggtgggttacctggccgcccgcttcaaccaccgccgcaacggcaatccggatcccggtcgccccagccgcgcccatcccgccttttttgaaacccatccctacctgcgccgcgacagcaccgaccgtcgccctgccatcgccaaagccgacctggtcgatcagccctggctctcggaagccaccgctcgcaaagccctggtgggtcgccaggccaagcgcattgaaacaggcaagcaagggtggttccgcaagttccccacctgggatcccggctttgtggaaagctgggtaacgcgatttgcccgctttctcaactctcccgccggcgagccctaccgggagcgctatttgcagccccatcagggatctgtccaggggatcggcgaggcccaatctctacgggaagtggccaacgccagcctgggcagccagggctttgtggcttacctttacgccgatggcaacgacatggggggctatgtgcagcagatccaaaccccagaagcctaccgacaatttagccgggatgtttccgaggcaacggaaaaagccgtttaccacgccctcgcccagcacctgcaggcccatcggctgcacggcctatccccagatccggaaaccggcagagaccgcaacggcgagtggatccaccccttcgagatcctgaccatcggcggagacgatgtgttggtggtggtgcctgcccacaaagccctggaaattgccgccaccttctgtgagcagtttgagcagctcctgctggacacctcggcaacctatgcagctcaatcttccggcaaggtgcctcaccgctacccggcggcagatcggaagctctgtcggctctccgcctcggtgggggtgctgatcgcctcggaagacacccccatttactacgccgaaaagctcaccgaacaactgttgaaatccgccaagagctacgcgaaaaagctgaagcccaaagacaaggactgctctgtggccaccatcgactttctctcgttgaagtcggtcgccctggttgtctccagcatccaggattttcgtcgggaagctctggagatccgccagaacagccacaccctcaagctctacgccggcccctataccgtcccggaaatccacgggttgctgagaacggtacaagccctgcaggaggccaattttcctcgctcccagctttatcagattcgcagcttcttggaaaaaggcaaacgcaccgccaccctcaactatctctatttccgcagccgcctgggcaaaaaggggcagccgctgatggaggcttttgagcgcacctggtgcaaggccaaaaccaacgacggccaccttcccccctggatgtatgttgagccacaggtatcctcgtcaacgccaacctatgaaaccatctggcgggatctggtggatttgtacgcctttgtgcaaaaacagccccaggccgagggtcggcccgttctggcggaggtggagtga

SEQ ID NO: 1084 - protein, 736 aa, Synechococcus sp
MRAAVRADNEAGIPEELRPILAQVRQFQESMAAKTFPRTPAELQSRYPELWQQTTRIGLVYGGATKIKSYVFESAKLSEIRGASALLDRINLVDLPAFFGDPEQTYLGWEGLGKESQAELRAYVAEQIRPWLQQHYPALAQALIPELIIYSTGGNLLAFCPAAHVDDLCEAIERRYTEETLTANACAVGSAFRLLELRYGLLRDPIERTPWLDWLAQHKTHPLVRAYFGDGSEARFQDRKSFNELVGYLAARFNHRRNGNPDPGRPSRAHPAFFETHPYLRRDSTDRRPAIAKADLVDQPWLSEATARKALVGRQAKRIETGKQGWFRKFPTWDPGFVESWVTRFARFLNSPAGEPYRERYLQPHQGSVQGIGEAQSLREVANASLGSQGFVAYLYADGNDMGGYVQQIQTPEAYRQFSRDVSEATEKAVYHALAQHLQAHRLHGLSPDPETGRDRNGEWIHPFEILTIGGDDVLVVVPAHKALEIAATFCEQFEQLLLDTSATYAAQSSGKVPHRYPAADRKLCRLSASVGVLIASEDTPIYYAEKLTEQLLKSAKSYAKKLKPKDKDCSVATIDFLSLKSVALVVSSIQDFRREALEIRQNSHTLKLYAGPYTVPEIHGLLRTVQALQEANFPRSQLYQIRSFLEKGKRTATLNYLYFRSRLGKKGQPLMEAFERTWCKAKTNDGHLPPWMYVEPQVSSSTPTYETIWRDLVDLYAFVQKQPQAEGRPVLAEVE

SEQ ID NO: 1085 - DNA, 1182 bp, Synechococcus sp
gtgttgattgttgctgtggactgggaatgggctgtgcctatgctgagtttctcagagccatctgctgatagagaagcgaacggcaagtggccgacgggatccgagttggtggggatcaccttggaagttcaggctcctcggtcttacctgctggatccccactatgccaaagggctgcacgcctggttcttgagccaggtgcaagagacagacccgcagctatcggcctatttgcacgatggagaatcggagaaaccttttaccctctcccggctgatggggccgttccgcgagcagggggggcgaccgctgatcccgcctcatctccccttccgctggtggatcaccggcctcaacccgccggtggtggagtggctgcgagggtggtgccaacggctgcccacttggctggaattgcggggatccccgctgcagatcctgggatggcagatctcgatccccccgcgcacctatcgtcaactgttggagcagcctctttccccccgctcctggagcctttccttcgtctcgcccaccagctttcgccaccggggccaccatctgccgctgccgatccctcgcaacctgttccacagctatctgcgccgttggaacgatttttccggtctgcccatcgaggcggagccttttctggattgggtggatggggaagtgatcatccagcggcaccgtctggaatcggtcaaaaccaccgcaggtcgccagggatccgtgacgggattcatcggctgtgtgcagttggctgtctcctcccgtgcgcctgagctgttgcagcagcagctccaagccctgatccaccttgccccctactgcggcaccggccacaaaaccccctttgggctagggcaaacccgcctgggttggttggccgaagagctacccgcctcccctgtcccttcccgggaagagcaggtggcccagcggatcgaggagctgagcgccctctttctcagccagcggcaacgacaagggggatcccgcgccgaaaaaactgcccaactgtgggcgacgatcctggcccgccgcgaaggtggagagagcttacaacagatcgccgctgatttggagatgccctacgagacggtgaagacctatgccaagctggcccgccgctctctccagtctggatcccaggactactcgtcgagcagtcttccctag

SEQ ID NO: 1086 - protein, 393 aa, Synechococcus sp
MLIVAVDWEWAVPMLSFSEPSADREANGKWPTGSELVGITLEVQAPRSYLLDPHYAKGLHAWFLSQVQETDPQLSAYLHDGESEKPFTLSRLMGPFREQGGRPLIPPHLPFRWWITGLNPPVVEWLRGWCQRLPTWLELRGSPLQILGWQISIPPRTYRQLLEQPLSPRSWSLSFVSPTSFRHRGHHLPLPIPRNLFHSYLRRWNDFSGLPIEAEPFLDWVDGEVIIQRHRLESVKTTAGRQGSVTGFIGCVQLAVSSRAPELLQQQLQALIHLAPYCGTGHKTPFGLGQTRLGWLAEELPASPVPSREEQVAQRIEELSALFLSQRQRQGGSRAEKTAQLWATILARREGGESLQQIAADLEMPYETVKTYAKLARRSLQSGSQDYSSSSLP

SEQ ID NO: 1087 - DNA, 1194 bp, Synechococcus sp
atgacccaagtcctgaccgtctcctgcaagctcaaggtgtcccagtcgcaagccgccaaattggacgcgacgatggaggcttttggccaagccttgaactgggtcaaccagaacacgccggagaaagtcgccaacgccgttaagctccagtctctgtgctaccgcgaaatccgggcccggttcggcttgtccagtaacttggcccagcaggtctgcagacggctggccggcgcccgtaaagttgcccgacagaaaaaccgccccgtcaaagtgttcaagggtggcttcgctacctacgatgcacgtatcttttcgttccgcgagaaagactggacggtgtcgctgaccacggtggagggtcgagagcgctttgagctggcgattggccgttaccagagagaacagctgacaggctccaatccaaaatccgccactctggtcaaacgcaaagatggctcctacttcattcaaatctgtgtggaagcggagccatccccaccgcaacgcacgggcagagtgttgggggtggatttgggcaggacggatattgctcatacatcggaaggagataactggaatggacagcagctgaacaaagtccgagaccattactcgcggttgagggcggtactccaacgcaaagccagtaagggcacacgcagttcgcgacgcagatgccgtcaactgctgcaacggctgtctggcaaggagaggcgctttcaggcgtgggtcaatcatcgcatctccaaagctattgtctctagggcaaagaccacaaacagcgctattgccctggaagacctgacagggatccgggaaagggtcaatcaacagccacgaggtaagacagagtgcaggcgggccaatagttgggcattctaccagctcaggatgttcgtggcctacaaggctgccatcgccggagtacctgtggtactggtgtcgcccgcctacacgtcgcagacctgccaccggtgtttgcacatccatcccgatcctacgcaatcctatcgcagtggtaagtcgttcaagtgtgggcactgtggatgggaaggggatgcggatttgaatggtgcgaatgtgattgcgctcttgggggctgtcgtaaaccagcctagaggtccgggcttgttttgttctctggtagagcagaacaggctcagggctactgaaagcccgctccgtaccgcttag

SEQ ID NO: 1088 - protein, 397 aa, Synechococcus sp
MTQVLTVSCKLKVSQSQAAKLDATMEAFGQALNWVNQNTPEKVANAVKLQSLCYREIRARFGLSSNLAQQVCRRLAGARKVARQKNRPVKVFKGGFATYDARIFSFREKDWTVSLTTVEGRERFELAIGRYQREQLTGSNPKSATLVKRKDGSYFIQICVEAEPSPPQRTGRVLGVDLGRTDIAHTSEGDNWNGQQLNKVRDHYSRLRAVLQRKASKGTRSSRRRCRQLLQRLSGKERRFQAWVNHRISKAIVSRAKTTNSAIALEDLTGIRERVNQQPRGKTECRRANSWAFYQLRMFVAYKAAIAGVPVVLVSPAYTSQTCHRCLHIHPDPTQSYRSGKSFKCGHCGWEGDADLNGANVIALLGAVVNQPRGPGLFCSLVEQNRLRATESPLRTA

SEQ ID NO: 1089 - DNA, 1458 bp, Synechococcus sp
atgagcggatttgagctgcctttgacggtggaagtgttgcgttggttagcgggcggtcagttggccgagcgcctggagcgggccgtgcgcctgtgggtactgctccactgcctctatggcgaaaaccgctggccagacctgccggaaacctttggctacacccacatccgggatcgcttgctctcaccacggcaccccaagcaggatctggcacaagggatcccttcaccctgtcctgatgttgactgcatttgctggaaacccttgaggttttggctgaaggatcccaacctattggccgccttaaaagtagaagttccggatctggaagcgctgctatctgcccgaccctttcacaagacccaccgcaccctgcgcaaagagctggactacctggccgcccagggttggctgcagcaaattcaggccaaccccaagcgaagagacaacttccgctgctgcgccccaggggctcatccccagttgccggcaccttcatccacttggactctatcgggcaagcagcttgagcagatttatcacatcctcagcgatgtggcctttgtgcatccagatgtccaggttttgctggatgaaatctgggccaaccaaaggactccgtcccgctggcgcgatcagcactcgcagcggcggctgtttgtgtggtttgagtacatcctctcggacgaacagcaagaacgggtggatgaatatcaaagccagctagaagccctttgggccaacccagaagcaggggtgatcggttttgactacgccacccgccaacatgggatccgacacgttctcacttacccagtctgtttgttctatgcccgccgcgccaagtatttggcagcctttggccagcttcccacccccgaaggatccctgggctggcacaatttccgcttagatcggatccagtctgagcgcctggcggtgattccctgggacgctccttccattccgccagagctggcaatccgcaaacggcaaaagaagctgcccagcccagaggaagtccaagcagcatgggaagaagcctggggatccgatttttacttgcccaaggcattgttgatccttcgattttccccggagtttgcccgtcgctatgtggaaagcacagtgcgacatcccaccttccagcccattgcctacgagcggatcccggctttggtgcagcaggcagtggcggatgcgcgggagcgcgaacagattttgaacattgtccggcaaagaccaaccagcgaccggtacttccgcgcctgggtacgggtgggagataccaatttcaccatgcgcctgcgggattggcggcccaacggcgaggtcatcgctcccctggcctaccgggaacagatggctcgggaagcccaggcagagctgcagttttatcgccccgacgtaaactacccggctccgaccgctaagcggtacggagcgggctttcagtag

SEQ ID NO: 1090 - protein, 485 aa, Synechococcus sp
MSGFELPLTVEVLRWLAGGQLAERLERAVRLWVLLHCLYGENRWPDLPETFGYTHIRDRLLSPRHPKQDLAQGIPSPCPDVDCICWKPLRFWLKDPNLLAALKVEVPDLEALLSARPFHKTHRTLRKELDYLAAQGWLQQIQANPKRRDNFRCCAPGAHPQLPAPSSTWTLSGKQLEQIYHILSDVAFVHPDVQVLLDEIWANQRTPSRWRDQHSQRRLFVWFEYILSDEQQERVDEYQSQLEALWANPEAGVIGFDYATRQHGIRHVLTYPVCLFYARRAKYLAAFGQLPTPEGSLGWHNFRLDRIQSERLAVIPWDAPSIPPELAIRKRQKKLPSPEEVQAAWEEAWGSDFYLPKALLILRFSPEFARRYVESTVRHPTFQPIAYERIPALVQQAVADAREREQILNIVRQRPTSDRYFRAWVRVGDTNFTMRLRDWRPNGEVIAPLAYREQMAREAQAELQFYRPDVNYPAPTAKRYGAGFQ

SEQ ID NO: 1091 - DNA, 969 bp, Synechococcus sp
atggctgctgtggcactgcatttgctttccggctgtctggccgctcgcgccagcgggacggagtcctttcgcgccagcgggacggagtccttggaccctcgaagatcccattcttcggaactgtcttttcaggtcatcgaaattgagctgacccgaccggatcgcctggtttttccagaggatttggctcagcttcagctgcctgccgggatcaatgcccagctgggggtggttctgacggggcgggcccccatttggctgtatggctggctggtgcatgagtgccacttcacccgttgggtggcctgttatgacccacgcttgggcgcggtggtggtctccagccatacccccgaagtgcgggtgggccaggtcatcccctgggtgcagggaaggccgggcaaggcctacggcccgctgacgcgaacagaattggcagcggcggtgatggtggtgggcccccccgacagtggcaaaagccgtcttgcccgcgccctcttcgaagctctgctgccggagcatcccgatatttatctgcaacgggcccattgggatggggaaggcaattggactttagacttgccaccagaagaggcgaagatcctcaagcaccagtaccggggctcttttacccccgaatttttcagcttccatgcccaggccattctggctttgcgccggcaaaagagtttggtgattgtggatgtgggcggcaaggtggatccgcaaaagcagccgatcctggaagcctgctcccactacctggtggtcagccgggatcccgaggctatccctctctggcacgagttttgtcgagaccggggcaatttgcgctgtgtggccatcctgcacacctcgcccggccctcctcaagtgctcaaagactcacctgagttggaaattcgctgggatcccaactctcctccccccgcggagctgcttcgggcggtgcgccgcttgattgcctag

SEQ ID NO: 1092 - protein, 322 aa, Synechococcus sp
MAAVALHLLSGCLAARASGTESFRASGTESLDPRRSHSSELSFQVIEIELTRPDRLVFPEDLAQLQLPAGINAQLGVVLTGRAPIWLYGWLVHECHFTRWVACYDPRLGAVVVSSHTPEVRVGQVIPWVQGRPGKAYGPLTRTELAAAVMVVGPPDSGKSRLARALFEALLPEHPDIYLQRAHWDGEGNWTLDLPPEEAKILKHQYRGSFTPEFFSFHAQAILALRRQKSLVIVDVGGKVDPQKQPILEACSHYLVVSRDPEAIPLWHEFCRDRGNLRCVAILHTSPGPPQVLKDSPELEIRWDPNSPPPAELLRAVRRLIA

SEQ ID NO: 1093 - DNA, 36 bp, Synechococcus sp
gttcccccttcggggggatccctagaaattggaaac

SEQ ID NO: 1094 - DNA, 771 bp, Synechococcus sp
atgacttttcagattgcctacctccatctattgactcccctgcacactggcggcaccacccaagaaggcaacctcttgggcattgcccgcgaatcccacacccatttgccctacatcccttccagcaccattcggggcaggttgcgggccagcgtggccgataaagacaaaaaatttgagctctttggcaacgaaattggggaaggggatcagcttacccaaggatccatttggattggagatggctctttgctgtggatcccggtgccctccctcagccacggggtggtgtggataagctgcccgcttctgctcaagcgctggctgcggctaacaggccagaatctgtcagtgccggatccctacagtacgagcttgaaggccgaccgacccatttacctcaaagatgccattctcaaagagggtcttcgacaatggtcggaatggaagagctacaccaaagaccccaacatcagtcgcgtgattgttttacccgatcagcattgtgccaccctcattcaaatgagcctgtggcggcaggtgaaagtcaagcttagcgagcacaaggttgtggaaggaggcttccgctacgaagaggctattcctcccgatagcttgatgtactttacctggggggttacagcccaagcaaatggcagttctcgacagacagcagaagagtttcaaaagctgctgcaatccaaccagattatgcagattggcggccaggaaagcttgggccgaggctttgtggagctgtctttgaactag

SEQ ID NO: 1095 - protein, 256 aa, Synechococcus sp
MTFQIAYLHLLTPLHTGGTTQEGNLLGIARESHTHLPYIPSSTIRGRLRASVADKDKKFELFGNEIGEGDQLTQGSIWIGDGSLLWIPVPSLSHGVVWISCPLLLKRWLRLTGQNLSVPDPYSTSLKADRPIYLKDAILKEGLRQWSEWKSYTKDPNISRVIVLPDQHCATLIQMSLWRQVKVKLSEHKVVEGGFRYEEAIPPDSLMYFTWGVTAQANGSSRQTAEEFQKLLQSNQIMQIGGQESLGRGFVELSLN

SEQ ID NO: 1096 - DNA, 1140 bp, Synechococcus sp
atgagttggtttaccctatcacccttggatgtgtggatgtttcgagatgctaagccctttgccccgggagagcgggcctgggccaatagcagctttccccctagcggccataccttggccggggctgttcaagcctacctgggccaacccttgacgctgcggctgcggggcccctttctctgccacgacgaaaggctctatttccccgcccctctgcatctggaagacggattcccccttgttcccgttccttggttggacgagagggatccctacttccattgccactgggatcccacccggccagcccccttggtttccttgaggccggtagaggaggaacccgaacgcagccagagcagcaagaagaaaaaaacaggaggctacctgcccttcgaggtggtgcaaaaggcgctggaaggcaaaggctgggatctcagccaggccgtcaagccgccgttgaagtatgaagtacggccccacaacaccctgcaggtgagcaagcggcaagtgcgagaagccgatggctactttgtggagacctgcatccgccttcagccgggctggagtttggccctttccatcgagggctgggatcccgatcgcgaagcctgggatcccctaccccttactcaggaagcagtgctgcggctggggggagaaggccactgcgctttgctggccccctgtccgaagctgcaggagcagtggcagcagttgcaggccctttctcaggccgccttttgccaagccggacgcgctttggcctacttagcgaccccaggcgtgttcatcaagaaggtggagggacgctccctatgccgtgcctggccctgggaatggagattggccactccccaccccgcccatcccctcaccggccccttggtgagcgtggccaccggcaagcccgttgccatcagtggacgcctgcgggtggatcgccccccagagcagcggcagatgagcctgcccgccccccaagtttttgccgcgccccctggcagtatctactacctggagcagccggcccccctcaaccaagaagagcccgagctagaagatggccggctcaacgtgttccaccgctggcggctgttgggctatagcgagctcctatggctgccttgggccaactga

SEQ ID NO: 1097 - protein, 379 aa, Synechococcus sp
MSWFTLSPLDVWMFRDAKPFAPGERAWANSSFPPSGHTLAGAVQAYLGQPLTLRLRGPFLCHDERLYFPAPLHLEDGFPLVPVPWLDERDPYFHCHWDPTRPAPLVSLRPVEEEPERSQSSKKKKTGGYLPFEVVQKALEGKGWDLSQAVKPPLKYEVRPHNTLQVSKRQVREADGYFVETCIRLQPGWSLALSIEGWDPDREAWDPLPLTQEAVLRLGGEGHCALLAPCPKLQEQWQQLQALSQAAFCQAGRALAYLATPGVFIKKVEGRSLCRAWPWEWRLATPHPAHPLTGPLVSVATGKPVAISGRLRVDRPPEQRQMSLPAPQVFAAPPGSIYYLEQPAPLNQEEPELEDGRLNVFHRWRLLGYSELLWLPWAN

SEQ ID NO: 1098 - DNA, 2988 bp, Synechococcus sp
atgtcttactactggcaagctaagctctggggtctgttacatgatcccgccctcaaagccctacacgacaggactggccgctccaaggaagggctgtggaccagactggcggcgatgcagggatggtcttctcccaaagccgagggatcctctcccataggcgatgctgatctcatcgcctcggccagcgaccgcgcggccattggccatttgcctgtagccatcgactaccaggttgaggatcgcggccaggggttaggctctggactggagatgagccatctgctctcggggcgcaagcacttttggcaattggccaatgagcaacaccaagccctcaagaatgcccactcccgtgcagactacctgatggaacgggaggagaacgccatccctgattgggttcggcaggagacggatccccaaaaagtgttttggtggttttggcggtgctttccccaagctatttgtcaggagtttggggatgagagcttgctgctgttgccggcagaaacccggctgccagacggatccctgtggagccacgccagcgtcaccgcagccttggccggatgtttggccggctacgacgagcccaagttcgcgcgtcccttcttggtgagctttaccttcaaccccatccaggagctgatcaaagccagccgcaaaatgcgggacttctgggctggctcctggctgctgcactacctttctgctcgcataagttggcggcttgccgagaaatacggccccgactgtctgctctaccccagcctctatggccagccattaatcgactactggctgcgggagaagtaccccgaatttgaagaatggatccctcagccttcgcctaacgccctgctcaccgccggctttcccaatgtgctcctgctgctgctgccagaagagcgggtggaggcggccatgcagtttgcccagcagaccctcaaggaagaatggaagcagttggcccagagggtgctggatcacctgcaggcggatcgccgctggctgaggcagttgcacccagaggatcccacctggcagggatggctggagcaccagtggcagcactactgggcagccgtgcccctgggatccccggctcatgccctcaaggataccggcatccttaggccccctcaggtttccattgatgcggatccctgggtcagtgcccaaaaccgcacccatcacctagaggccaagcaaaagctcttcggggatgaggagctggagttcttgcgagttagcttctgggatccccaaagacaacagcgccgccaatacaaggccggactcaacgtgggatcttggtgggcagccgcagtggagcaaagtcggcggctacaagccgcttgtaagcaggcccgcgattggcagctccccgttgcgtttgggccgcgcagcaccgtttcgggcttggggccggtggtgcatccctcaccgcggcaggggtggataacagaaggggagagtcggcggctttggcaacggcaggccgggctcttcgatggccgggaacagctcaatgccaccgaaaccctcaagcggggcttgtacaaagtgctgccggagctcttccgcgagctggatgaagaccagattgccgcttcctacccggatctcacggctggcgtagccggctacctcaaaacccaagggcgacgggaacgagagcacttcgagcaggcctgtcaggcagtggaggcccgctacccggaggtcagaggggtgctgcgggaaatgcggggcaaatgggggatcccgtgggccgaccggcagaacctgcgctaccatccccgtctgctcaatgccggttggctggtggaagacctggagctggacgaggaaacgcaaagaagctaccggcaggacatcgagacgcttctaggccgctactaccccagcgttaaccccgccagttggtacgtgctggctgccggggatggggacgacatgggcaaatggctcaggggcgagaagatgaaatcctactacgactatctgcctcaacccctacagcggctggccaacgggcaaacggaagccattggcgaggtctttggcaaggacaaggaggagctggagcaagtcaaagacgcttttcagaagtttgtcaaaaacagccgcaagcgcatggggcctgccacccacagcgccctaagccgcgccctgctggatttttccggccagttggtgccctacctaacagagcaacgctacgcaggcaagctcatctacgccggcggggacgacgttttggcctacaccaacctctgggagtgggatggctggctgtgggatattcgccagtgtttccgggggggagaggatgactggcgggagtttgagaacctgggggactactggcagtggaaaaaagggcggcctcccgaaggtttgagccggcgccccctctttaccctgggatccgcagccaccatcagcttcggcgtggtgattgcccatcactcggtgcctctggccattgccctggaaaacctttggcaggcggaagaagaagccaagggccacctctatgcccatggctgccccaaagacagcgtgcaggtgcgggtgctgtttgccaatggcaaccaactggtgagcaccagcaagttcgacacgttcgacaagtggaaggatctccttgattttgactggaagctcatgggccagcagcaggatcaaagctccttgtttgagcaggcagcccaactgtgggagcaacatcctgcccccagcccagaggcggtgccagcctgggccacgctcttttgcagccgccgggatctcttcaaacaggaatcggagcagaaagagcacttccagaacaagcttgtggagtttatccagcatttttggcagcacagcctgcccgcccagccccaggagtgggatctggagatcaaaaactggttcaagctggcggcttttgtgctgcgcaaccgcaccgtgaaattggggaggaacggccgatga

SEQ ID NO: 1099 - protein, 995 aa, Synechococcus sp
MSYYWQAKLWGLLHDPALKALHDRTGRSKEGLWTRLAAMQGWSSPKAEGSSPIGDADLIASASDRAAIGHLPVAIDYQVEDRGQGLGSGLEMSHLLSGRKHFWQLANEQHQALKNAHSRADYLMEREENAIPDWVRQETDPQKVFWWFWRCFPQAICQEFGDESLLLLPAETRLPDGSLWSHASVTAALAGCLAGYDEPKFARPFLVSFTFNPIQELIKASRKMRDFWAGSWLLHYLSARISWRLAEKYGPDCLLYPSLYGQPLIDYWLREKYPEFEEWIPQPSPNALLTAGFPNVLLLLLPEERVEAAMQFAQQTLKEEWKQLAQRVLDHLQADRRWLRQLHPEDPTWQGWLEHQWQHYWAAVPLGSPAHALKDTGILRPPQVSIDADPWVSAQNRTHHLEAKQKLFGDEELEFLRVSFWDPQRQQRRQYKAGLNVGSWWAAAVEQSRRLQAACKQARDWQLPVAFGPRSTVSGLGPVVHPSPRQGWITEGESRRLWQRQAGLFDGREQLNATETLKRGLYKVLPELFRELDEDQIAASYPDLTAGVAGYLKTQGRREREHFEQACQAVEARYPEVRGVLREMRGKWGIPWADRQNLRYHPRLLNAGWLVEDLELDEETQRSYRQDIETLLGRYYPSVNPASWYVLAAGDGDDMGKWLRGEKMKSYYDYLPQPLQRLANGQTEAIGEVFGKDKEELEQVKDAFQKFVKNSRKRMGPATHSALSRALLDFSGQLVPYLTEQRYAGKLIYAGGDDVLAYTNLWEWDGWLWDIRQCFRGGEDDWREFENLGDYWQWKKGRPPEGLSRRPLFTLGSAATISFGVVIAHHSVPLAIALENLWQAEEEAKGHLYAHGCPKDSVQVRVLFANGNQLVSTSKFDTFDKWKDLLDFDWKLMGQQQDQSSLFEQAAQLWEQHPAPSPEAVPAWATLFCSRRDLFKQESEQKEHFQNKLVEFIQHFWQHSLPAQPQEWDLEIKNWFKLAAFVLRNRTVKLGRNGR

SEQ ID NO: 1100 - DNA, 1380 bp, Synechococcus sp
atgcccgtgcttcaatgcttgaaagccgtcatcgagaggatccctatggctaatacccttttgaccactctaggcaccagcccctacagcgagacggtgtatgtttttggggagcggaaagccgatagaacccgttatgttgccaaagccctctgtcagctctttgacatcgagagggtgattgtgctgctaacccaagaagcacatgacacccattggaagcatctacaggactgcctacccccccacgtggagaaaattgccaaggccattcctgaagggaaaaccgaggcagagacctgggagatcttcgatgtgctggtcgatagcatcgagccccatacgcggctggttttcgatatcacccacgcctttcgctccatccccgtgctggtgctcttgggagctgcccttttgcgcaaggccaaaaatgtagagattcagggtctctactatggtctgtaccgctctggccaagcggaaacccccattatcgatctcacccccgcccttcgtcttttggattggctgacggctaccgacaaattcatcagcaccggctcggcgctggagttgggtcaacttttggatacggttcaacgggacttttaccgccgacaaaagtctggcaaaggggatcccagacctactcggctgcaaagctttggccgagccatccgcaatgtttcccgctctcttgaactggtaagacctgtcaatctcctaaaagaggacttgcccaatttgcaaaagcactccaccgcggatctggagcaagaggtgggtcaatttgccaagccttttggcctgctgctgcgaagcattcaggatagctacagccaactggctctacccgcggacagggcttcggatcccaaagcccaagttcaaaagcaatttcaactgctgcgctggtatgtagaaaagcgcctcatcacccaagctcttctactggcccgggagtgggtggtctccgccctttgcctctgtgaggggatccaaaactacctcgaacgagaagagcggcagggaattgaacaccagttggcatccctcattccacgagaagaccagccccttggagatccccctgcgactggcgaatcgggccgatccctcatcccacgggaagaccagccccaggcgcttcctcctattaccgcccatgtgcccgacgccaagcagcttgccgatctctggtctcgcctcagccagtaccgcaacgatgttgcccatgtgcagatgaatccagaccctttgaacagcgaagctctagaaagctttgttttgcaagacctgctgcctggcctggaagagctgtttcccaaattgacctgggcagaagggaagttggaaggggatctttccacttctccgtag

SEQ ID NO: 1101 - protein, 459 aa, Synechococcus sp
MPVLQCLKAVIERIPMANTLLTTLGTSPYSETVYVFGERKADRTRYVAKALCQLFDIERVIVLLTQEAHDTHWKHLQDCLPPHVEKIAKAIPEGKTEAETWEIFDVLVDSIEPHTRLVFDITHAFRSIPVLVLLGAALLRKAKNVEIQGLYYGLYRSGQAETPIIDLTPALRLLDWLTATDKFISTGSALELGQLLDTVQRDFYRRQKSGKGDPRPTRLQSFGRAIRNVSRSLELVRPVNLLKEDLPNLQKHSTADLEQEVGQFAKPFGLLLRSIQDSYSQLALPADRASDPKAQVQKQFQLLRWYVEKRLITQALLLAREWVVSALCLCEGIQNYLEREERQGIEHQLASLIPREDQPLGDPPATGESGRSLIPREDQPQALPPITAHVPDAKQLADLWSRLSQYRNDVAHVQMNPDPLNSEALESFVLQDLLPGLEELFPKLTWAEGKLEGDLSTSP

SEQ ID NO: 1102 - DNA, 37 bp, Synechococcus sp; identical to SEQ ID NO: 1072

SEQ ID NO: 1103 - DNA, 474 bp, Synechococcus sp
tggaacttcactggccgcaaccgacagccgccgctcgacccgatcaacgctctgctcagttggggctacggggtgctgctggcccgcgtgttctcggcagtggtgatggccgggttggatccctatctcggctttttccacgccaacttgccctaccgccccaacctggtgctggacatgatggaggagtttcgacccttggtggtggattgggctgtgctccagcttgtcaaggctggcctgctcacgccggaagactttgagccgtcgccggatgggacaggcatatggctgggatccctggccaaaaaactgtttttgggagagctggaacgccgcttccgcgagccattgctctatcctccccaatctcgccgcctgcccctcagtcaaattgtgctggagcaagcccgccggctgagccgttgcctggtgagcggtgacctagactatgagcccatagagctgcgctga

SEQ ID NO: 1104 - protein, 157 aa, Synechococcus sp
MNFTGRNRQPPLDPINALLSWGYGVLLARVFSAVVMAGLDPYLGFFHANLPYRPNLVLDMMEEFRPLVVDWAVLQLVKAGLLTPEDFEPSPDGTGIWLGSLAKKLFLGELERRFREPLLYPPQSRRLPLSQIVLEQARRLSRCLVSGDLDYEPIELR

SEQ ID NO: 1105 - DNA, 138 bp, Synechococcus sp
atgaccagttgtgcccttgagggtgtcgtctcgaccttccggctcagccagttgaaaatcatccccatcctgtttgccgaagccgtagtggatggaggatatctgtggagcgttaacttcaaccttaacctgatttga

SEQ ID NO: 1106 - protein, 45 aa, Synechococcus sp
MTSCALEGVVSTFRLSQLKIIPILFAEAVVDGGYLWSVNFNLNLI

SEQ ID NO: 1107 - DNA, 447 bp, Synechococcus sp
atgaccttcgccaccagcgagagcaaactggagcaaaaacaggaacttgagatccagcggcacattcggctggccgaagatgagctggttgccagaatccaaaccgccttggataactttaaaggtctgagcaaattggaagaggcccagtaccgcaacttgttgcatgtggcagcttccaccgaaagctcagaggtaatcaagaacttcttgcgctaccagatggggcgagatgaaaagtggggtcggggcaagaactccttggcagaagccatcatccaagacatcgacaactggatccatcaaaaggccctcgccattgcccaaaaggccggcgttgaagaaagatcccccaaagtcaacgagatcaaaattgacttgatccggcgttacctgggctatggggcgcgctatctcaagtacaagcgagaagggggaggatcttaa

SEQ ID NO: 1108 - protein, 148 aa, Synechococcus sp
MTFATSESKLEQKQELEIQRHIRLAEDELVARIQTALDNFKGLSKLEEAQYRNLLHVAASTESSEVIKNFLRYQMGRDEKWGRGKNSLAEAIIQDIDNWIHQKALAIAQKAGVEERSPKVNEIKIDLIRRYLGYGARYLKYKREGGGS

SEQ ID NO: 1109 - DNA, 1224 bp, Synechococcus sp
atggaggccattgaactcacgctcactgccgagtctcccctggccatcggtcggcaaaagccgggcggctccatcagcgaggcccaggacttcattcccggcagcgtgatccggggggccttggccgacctcctgctccgccaaagccggcaccgccccggcgaggccctgacaggagatctggccgccctgttcacggaggcccgtgcggcggtgtttacccatgcttatccgggatccggcagccgggttttgccggccacggcctttagctccaaaaacaaccccggcttccgctcagaggcgggcaaaacgggggtgttcgacacactgctggatcgcttctgctcgcagcggctggggatcccctttgatccggcagagccggatggctccgggggcagggtggagcccttcggcggcttttacagccaggaggagggatcccgctaccgaagggtggccgtgtccaagcgcctgctcacgcgggtggggatcaaccgccgccgcgccaccgccgccgaccagatcctctacagcctggaggtgatcaacgagggccgggccgggcgagatgggagcttgcagccttccctcttcagcggccacatctatctgcaggatcgcgagctggcggcagccctcgccggctacctcaacacccacgcccgccgcttgtccttgggagggggagtgtcgcgggggctgggccgggtcagccttgccgctcgacacctgagggccccgaagccctccctggctgagcgggtggcagcctttaaccaaaagctgcggcagcgctggcaacaatggcaggtgtttgggaatccctggcagcccttgccgccggagcggcagtacttctccatcgggctgcagtcgggggccatcctcaaggagcgctggcaacgcaccacggtgctcacgccgccgatgctccaggaggaggccaactgcgaggacggatccctggtcttggagctggcctgtagcagctacgcctatgtttccggctggaacgccgcctgggggctttttaaagatgtagagctggttacaacccagggcagcgtcttcctgctgagcaccacgcaaatggagcgctggatcccgattttggcggagatggaatactggggcatcggcgagcgaaccgcggagggatttggccaaattgaggtctgtagtctgttccatcatcatttctgggagaacccgctatga

SEQ ID NO: 1110 - protein, 407 aa, Synechococcus sp
MEAIELTLTAESPLAIGRQKPGGSISEAQDFIPGSVIRGALADLLLRQSRHRPGEALTGDLAALFTEARAAVFTHAYPGSGSRVLPATAFSSKNNPGFRSEAGKTGVFDTLLDRFCSQRLGIPFDPAEPDGSGGRVEPFGGFYSQEEGSRYRRVAVSKRLLTRVGINRRRATAADQILYSLEVINEGRAGRDGSLQPSLFSGHIYLQDRELAAALAGYLNTHARRLSLGGGVSRGLGRVSLAARHLRAPKPSLAERVAAFNQKLRQRWQQWQVFGNPWQPLPPERQYFSIGLQSGAILKERWQRTTVLTPPMLQEEANCEDGSLVLELACSSYAYVSGWNAAWGLFKDVELVTTQGSVFLLSTTQMERWIPILAEMEYWGIGERTAEGFGQIEVCSLFHHHFWENPL

SEQ ID NO: 1111 - DNA, 714 bp, Synechococcus sp
atggttcggctggcagagctgccccaaacgagcacctctatccctttgaaggccaccctcgcctcggctctggcggtgggatccggcggctccagcggctccctggcggacaagcccctgctcaaggatgcctacggcaagctgctcatccccggctcccagttgaagggaaggctgcgccacgagtgcgaaaagctggcccgcggcctcggctgggccatttgccgctcccccgacccggagcgcatgtgtcccaagcgggaggggatcgacggccacttcgaccgccccgaataccaggtcgagggctacgccggatcccattgcctggtctgccagatcttcggcaatccggccctgccttcccgcctgtgggtggcggatctcgtctgtgaggtgccgccggcagcgctggaagcgaccctccgcccaggagtcaccctcaaccgccgccgccgcaccgccgaggatcagcggctctacctcatcgagacctcgccggcagccgagctgatcttctccggatccctgcagcttttacccgactgccctccctggggcaaggccctgctgcgggtggccctgcaccacattggggcgctgggaggcagcaaatctgcaggcttgggttggttgcactgggatccccagtctctagctgccctgcagccgaatgacgcagattgggcctttttggccggaggagggagctga

SEQ ID NO: 1112 - protein, 237 aa, Synechococcus sp
MVRLAELPQTSTSIPLKATLASALAVGSGGSSGSLADKPLLKDAYGKLLIPGSQLKGRLRHECEKLARGLGWAICRSPDPERMCPKREGIDGHFDRPEYQVEGYAGSHCLVCQIFGNPALPSRLWVADLVCEVPPAALEATLRPGVTLNRRRRTAEDQRLYLIETSPAAELIFSGSLQLLPDCPPWGKALLRVALHHIGALGGSKSAGLGWLHWDPQSLAALQPNDADWAFLAGGGS

SEQ ID NO: 1113 - DNA, 2196 bp, Synechococcus sp
atgtgcgcagccatccgcaccgacgacgcagccgggatcccggaggcgctgcagcccctctgggcgcaggtgcgccaatttcaggagagcgtggcggccacaacctttcccaaaaccttggcagagttgcaatcgcgctatccggagctgtggcggcagaccagccgcatcggcttggtttacgggggggctaccaagatcaagggctacgtcttcgagtccgccaaactgccggaaattcgcggcgcctcggccctgttggatcgcattaacctggtggatctgcccgccttttttggggatcccgagcaaacctacttggggtggaaagccttggggaaggagtctcgagcagagctggaggcctacgtgaaccggcgggttcggccctggctgcagcagcactacccggctttggcgcaggctctcattccggagctcctcatctactccaccggcggcaacctcttggccttctgtccggcggcctatgtggacgacctctgcgaggccatcgagcgccgctacaccgaagaaaccctcaccgccaacgcctgtgccgtgggatccgcctttcggctgctggaactgcgctacggcctgttgcgggatcccatcgagcgcaccccctggctggactggctggcccaacaccaggcccaccctctggtgagggcctactttggagattgcagcgaagccagcttccaggcccgcaaaagtttcaacgagctggtgggccacctggctgcccgcttccagcaccgccgcaacggcaatccggatcccggtcgtcccagccgcgcccatcccgcctgttttgaaacccacccctacctgcgccgcgacagcaccgaccgccgcccggccctggccaaagccgacctgccaggtcagccctggctatcggaggccacagcccgcaaagcgctggtgggccgccaggccaagcgcctggagacaggccagcaggggtggttccgcaaattccccgcctgggatcccggctttgtggaaagctgggtaacgcgatttgcccgcttcctcgactctcccgccggcgagccctaccaggagcgctatttgcagccctgcgcgggatccggccaggggatcggcgaggcgcaatcgctgcgggaagtggccaacgccagccagggctttgtggcctacctctacgccgacggcaacaacatggggggctacgtgcagcagatccaaaccccagaggcctaccggcaatttagccgcgacgtttccgaggccacggaacaagccgtttaccgcgcccttgcccagcacctgcaggcgcaccggctgcggggcctgccgccggatccggaaagcggcagagaccgcaacggcgagtggatccaccccttcgagatcctgaccatcggcggggacgatgtgctgatggtggtgccagcccacaaggccctggacattgccgccaccttttgtgagcagttcgagcagatcctgctggccaaatcggccacctacgccgcccgctccctcggccaggtgccgcaccgctacccggccgacagcccagaccagctctgtcggctctccacctcggcaggcgtgctgtttgcctcggaagacacccccatctactatgccgaaaggctgaccgaacaactgttgaaatctgccaaaagccgcgccaaaaagctgaagccccgcgatcaagacttttcggtggccaccatcgactttctctctttgaaatcggtgactttgatcgcctccagcatccaggattttcgccagcaggccctggagaatcgccagaacggccacctcctcaagctctacgccggcccctacaccgtcccggagatccgtgggctgctgagaacggtgcaagctttgcaggcggcggattttccccgctcccagctctaccaaatccgcagctttttggaaaaaggcaagcgcaccgccaccctcaactacctctacttccgcacccggctgggccaaaaagggcagccgctgatcgaggcctttgaacgcacctggtgcaaggccaaaaccaacgacggccaccttcccccctggatgtacgtggcggcggagggggaacccacctacgagaccatctggcgggatctggtggatctgtacgcttttgtccaaaaacagccccaggccgagggtcggcccgttcctgtggaggtgaagtga

SEQ ID NO: 1114 - protein, 731 aa, Synechococcus sp
MCAAIRTDDAAGIPEALQPLWAQVRQFQESVAATTFPKTLAELQSRYPELWRQTSRIGLVYGGATKIKGYVFESAKLPEIRGASALLDRINLVDLPAFFGDPEQTYLGWKALGKESRAELEAYVNRRVRPWLQQHYPALAQALIPELLIYSTGGNLLAFCPAAYVDDLCEAIERRYTEETLTANACAVGSAFRLLELRYGLLRDPIERTPWLDWLAQHQAHPLVRAYFGDCSEASFQARKSFNELVGHLAARFQHRRNGNPDPGRPSRAHPACFETHPYLRRDSTDRRPALAKADLPGQPWLSEATARKALVGRQAKRLETGQQGWFRKFPAWDPGFVESWVTRFARFLDSPAGEPYQERYLQPCAGSGQGIGEAQSLREVANASQGFVAYLYADGNNMGGYVQQIQTPEAYRQFSRDVSEATEQAVYRALAQHLQAHRLRGLPPDPESGRDRNGEWIHPFEILTIGGDDVLMVVPAHKALDIAATFCEQFEQILLAKSATYAARSLGQVPHRYPADSPDQLCRLSTSAGVLFASEDTPIYYAERLTEQLLKSAKSRAKKLKPRDQDFSVATIDFLSLKSVTLIASSIQDFRQQALENRQNGHLLKLYAGPYTVPEIRGLLRTVQALQAADFPRSQLYQIRSFLEKGKRTATLNYLYFRTRLGQKGQPLIEAFERTWCKAKTNDGHLPPWMYVAAEGEPTYETIWRDLVDLYAFVQKQPQAEGRPVPVEVK

SEQ ID NO: 1115 - DNA, 1152 bp, Synechococcus sp
atgctgaccaagttgagtttttcagagccacccgtcgccggagcagaaaacagcaagtggccggcgggatccgagctggtggggatcgccctggaagtgcaggcccctcagccctacctgttggatccccactatgccaaagggctgcacgcctggttcttgagccaggtgcaagagacagacccgcagctatcggcctatttgcacgatggagaatcggagaaaccttttaccctctcccggctgatggggcccttccgcgagcagggggggcgactgctgatcccgccccagatccccttccgctggtcgatcaccgccctcaacccccaagtggtggagtggctgcgggaatggtgccgacggctgcccccctggctggagttgcgcggatccccgctgcagattctgggatggaaggtctcagcccccccgcgcacctatcgtcaactgttggagcagcctctttccccccgctcctggagcctttccttcgtctcgcccaccagctttcgccaccggggccaccatctgccgctgccgatccctcgcaacctgttccacagctatctgcgccgttggaacgatttttccggtctgcccatcgaggcggagccttttctggattgggtggatggggaagtgatcatccagcggcaccgtctggaatcggtgaaaaccaccgcaggtcgccagggatccgtgacgggattcatcggctgtgtgcagttggctgtctcctcccgtgcgcctgagctgttgcagcagcagctccaagccctgatccaccttgccccctactgcggcaccggccacaaaaccccctttgggctggggcaaacccgcctcggttggctggccgaagagctgcccgccacccccgtcctttgccgggaagagcaactggcccggcgcatcgaggagctgagcgccctctttctcagccagcggcaacgacaagggggatcccgcgccgaaaaaactgcccaactgtgggcgacgatcctggcccgccgcgaaggtggagagagcttacaacagatcgccgctgatttggagatgccctacgagacggtgaagacctatgccaagctggcccgccgctctctccagtctggatcccaggactactcgtcgagcagtcttccctag

SEQ ID NO: 1116 - protein, 383 aa, Synechococcus sp
MLTKLSFSEPPVAGAENSKWPAGSELVGIALEVQAPQPYLLDPHYAKGLHAWFLSQVQETDPQLSAYLHDGESEKPFTLSRLMGPFREQGGRLLIPPQIPFRWSITALNPQVVEWLREWCRRLPPWLELRGSPLQILGWKVSAPPRTYRQLLEQPLSPRSWSLSFVSPTSFRHRGHHLPLPIPRNLFHSYLRRWNDFSGLPIEAEPFLDWVDGEVIIQRHRLESVKTTAGRQGSVTGFIGCVQLAVSSRAPELLQQQLQALIHLAPYCGTGHKTPFGLGQTRLGWLAEELPATPVLCREEQLARRIEELSALFLSQRQRQGGSRAEKTAQLWATILARREGGESLQQIAADLEMPYETVKTYAKLARRSLQSGSQDYSSSSLP

SEQ ID NO: 1117 - DNA, 279 bp, Synechococcus sp
atgctgtggttggtttgctacgacgtggtggacgataagcgccgacaccagttggccaaacgcctggagcagtgctgccagcgagtgcaatactccgtttttgaatgccccctggacactgccgagctggaagagaagctggaaaagtcgtggctgcctctgctcaacctccaggaagatagcctgcgggcctaccctctggatgccagcgccaaacaacgcaccaaggtcttcggcgggcctcccccctacgagccgccggactacctcattttttga

SEQ ID NO: 1118 - protein, 92 aa, Synechococcus sp
MLWLVCYDVVDDKRRHQLAKRLEQCCQRVQYSVFECPLDTAELEEKLEKSWLPLLNLQEDSLRAYPLDASAKQRTKVFGGPPPYEPPDYLIF

SEQ ID NO: 1119 - DNA, 1194 bp, Synechococcus sp
atgacccaagtcctgaccgtatcctgcaagctcaaggcgtcccagtcgcaagccgccaaattggacgcgactttggaggcttttggccaagccttgaattgggtcaaccagaacacgccggagaaagtcgccaacgccgttaagctccagtctctgtgctaccgcgaaatccgtgcccggttcggcttatccagtaacttggctcagcaggtctgcagacggctggccggcgcccgtaaagttgcccaacagaaaaaccgtccggtcaaagcgttcaagagaggctttgcgacctacgatgcccgtatcttttcgtttcgcgagaaagactggacggtgtcgctgaccacggtggagggtcgagagcgctttgagctggcgattggccgctaccagagagaacggctggcgggctccaatcccaaatctgccactctggtcaagcataaagacggctcctactctattcagatctgtgtggaaacggagccatccccaccgcaacgcacgggcagagtgctgggggtggacttgggaaggacagatattgcccatacgtcagagggggacaattggaatggacagcagttgaaccgaatccgagaccactactccaagctgagggcggcactccaacgcaaagccagtaagggcacacgcagttcgcggcgcagatgccgtcaactgttgcaacggctgtctggcaaggagagacgctttcaaacttgggtcaatcatcgcatctccaaagctattgtctctagggcaaaagctaccaacagcgctatcgccctagaagacctgacagggatccgggaaagggtcaatcaacaaccccgcagcaaagccgaacggcgcagggccaacagttgggcgttttatcaactccgtcaatttttggagtacaaggctctgcgtgcaggggttgctttgattctggtgccgcctgcctacacgtcgcagacctgccaccggtgtttgcacattcatcccgaccctgcgcaatcctaccgcagtggaaagaagtttaagtgtggacactgtggatgggaaggggatgcggatttgaatggtgcgaatgtgattgcgcttttgggggctgccgtaaaccagcctagaggctcgtggttggcttgccaactgcagggctaccgaaagcccgccctgtactgcgaagcagtcagggtcgggtag

SEQ ID NO: 1120 - protein, 397 aa, Synechococcus sp
MTQVLTVSCKLKASQSQAAKLDATLEAFGQALNWVNQNTPEKVANAVKLQSLCYREIRARFGLSSNLAQQVCRRLAGARKVAQQKNRPVKAFKRGFATYDARIFSFREKDWTVSLTTVEGRERFELAIGRYQRERLAGSNPKSATLVKHKDGSYSIQICVETEPSPPQRTGRVLGVDLGRTDIAHTSEGDNWNGQQLNRIRDHYSKLRAALQRKASKGTRSSRRRCRQLLQRLSGKERRFQTWVNHRISKAIVSRAKATNSAIALEDLTGIRERVNQQPRSKAERRRANSWAFYQLRQFLEYKALRAGVALILVPPAYTSQTCHRCLHIHPDPAQSYRSGKKFKCGHCGWEGDADLNGANVIALLGAAVNQPRGSWLACQLQGYRKPALYCEAVRVG

SEQ ID NO: 1121 - DNA, 816 bp, Synechococcus sp
gtgttgctggacgatatctggggggggcatcaacactcgcagcggcggctctttgtctggtttgagtacatcctctccgacgaacagcaggagcgggtggacgaataccaaaaccagctagaggctttctggacaaaaccggcagcagggctgatccgctttgattacgaaactcgccagcacgggatccaaaaggtcctcacctacccggtttgcctgttttatgcccgccgcgccaagtacttggccgccttcggccagctcccgcacgctgccagatccctgggctggcacaactttcgcctggatcgcattcgctcgcctcgcctgacggtggtgccctggtctgaccctgcggtgccggcggagctcttggcccgccagaggcaggggaatctgcccactcctgaggaggtgcaagcggcctgggaagaggcctggggatccgatttctatctgcccaaggcgctcttgatcctgcgctttgcgccgcagtttgcccgccgctacgtggacaacacagtacgccaccccaccttccagcccattgcctacgagcggatcccggctttggtgcggcgggagatcgccgatgcgggggaacgggaaaagatcttgcacattctccggcagaggccggccagcgaccgctacttctgcgcctatgtgcgggtgggagacaccaatttcaccatgcgcctgcgggattggcggcccaacggcgaggtcatcgctcccctggcctaccgggaacagatggctcgggaagcccaggcagagctgcagttttatcgccccgacctgaagctttcttga

SEQ ID NO: 1122 - protein, 271 aa, Synechococcus sp
MLLDDIWGGHQHSQRRLFVWFEYILSDEQQERVDEYQNQLEAFWTKPAAGLIRFDYETRQHGIQKVLTYPVCLFYARRAKYLAAFGQLPHAARSLGWHNFRLDRIRSPRLTVVPWSDPAVPAELLARQRQGNLPTPEEVQAAWEEAWGSDFYLPKALLILRFAPQFARRYVDNTVRHPTFQPIAYERIPALVRREIADAGEREKILHILRQRPASDRYFCAYVRVGDTNFTMRLRDWRPNGEVIAPLAYREQMAREAQAELQFYRPDLKLS

SEQ ID NO: 1123 - DNA, 921 bp, Synechococcus sp
atgtctgctgtggcgctgcagttgcggtctggctatctggcccattggccgcagaaaccccatcttggggggctaccgtttcaggtgattgaaatcgagctgacccgaccggatcggctggttttcccggaagatctggcccaactgcgcctgcctggggggatcgacccccgcttgggagtggtgctgagcgggcgcgcccccatctggctctacggctggttggtgcacgagtgccactttacccgctgggtggcctgctacgacccgcgcttgggggcagtggtggtctccagccatagcccagacgtgcaggtgggcgagatcattccctgggtgcagggcaggccgggcaaggcctacggcccgctgacgcgaacagaattggcagcggcggtgatggtagtgggcccccccgacagtggcaaaagccgtcttgcccgcgccctcttcgaagctctgctgccggagcatcccgatatttatctgcaacgggcccattgggatggggaaggcaattggactttagacttgccaccagaagaggcgaagatcctcaagcaccagtaccggggctcttttacccccgaatttttcagcttccatgcccaggccattctggctttgcgccggcaaaagagtttggtgattgtggatgtgggcggcaaggtggatccgcaaaagcagccgatcctggaagcctgctcccactacctggtggtcagccgggatcccgaggctatccctctctggcacgagttttgtcgagaccggggcaatttgcgctgtgtggccatcctgcacacctcgcccggccctcctcaagtgctcaaagactcacctgagttggaaattcgctgggatcccaactctcctccccccgcggagctgctgcgggcggtgcgccgcctcattcactag

SEQ ID NO: 1124 - protein, 306 aa, Synechococcus sp
MSAVALQLRSGYLAHWPQKPHLGGLPFQVIEIELTRPDRLVFPEDLAQLRLPGGIDPRLGVVLSGRAPIWLYGWLVHECHFTRWVACYDPRLGAVVVSSHSPDVQVGEIIPWVQGRPGKAYGPLTRTELAAAVMVVGPPDSGKSRLARALFEALLPEHPDIYLQRAHWDGEGNWTLDLPPEEAKILKHQYRGSFTPEFFSFHAQAILALRRQKSLVIVDVGGKVDPQKQPILEACSHYLVVSRDPEAIPLWHEFCRDRGNLRCVAILHTSPGPPQVLKDSPELEIRWDPNSPPPAELLRAVRRLIH

SEQ ID NO: 1125 - DNA, 36 bp, Synechococcus sp; identical to SEQ ID NO: 1093

SEQ ID NO: 1126 - DNA, 990 bp, Synechococcus sp
atgcgaaccttgtatgtttcccagcaagggtgcaggctaagcctcaggcaagagtttgtgctggttcatttgggcgagtcgctcttgcaagagatgcctctgcccttgctggagcaaattttaatctttggccgctctcaggtgactaccgatgttgtgagggagtgcttgaagcgcaatatccccattgcctacctctcccggctcggctattgctacggtcgcctcattcccattgaaaggggctaccgccgcctggcccattggcaacaggcgctccctgaagcatggagactgcaaacagcagcctaaatagtgcgagctaagctcctcaatggccgcgtgctgttgatgcgacaacttaggcagcgccccagcgaaaccagggatctaaccctgcgcagcctggaacacttggccgctcaagctctgcaggctacttcgctggatcaattgcgaggcattgaagggatcggcgcagctttgtattttcccgaattgggcaattgcttacaacaaaaaggatttgttttgatcaagcgcacccgacagccgcccaccaatccagtgaatgccatgctcagctttggctacatggtgctctggaaccacctattaaccttaattgagctgcaagatttggatccctatcaaggttgcctacatgccagcagcgaacgccacgctgctttggtttccgatttgctggaagagttccgagcgcctattgtggactcactggtactgtggctggtcaacagcggtgttatggatatccaagaagacttcgagtatcgagatgggggctgttttctcagcgatgctggcagaaagaagtatctcaaagcttttctccagagaatggagggatccatccaaacccccgatggggatcaaccccgctgggatttgctgacgcagcaggttaagaaatttaagcattctgtctataatcctcaagacctgtatcagccttaccggattcgctga

SEQ ID NO: 1127 - protein, 328 aa, Synechococcus sp
MRTLYVSQQGCRLSLRQEFVLVHLGESLLQEMPLPLLEQILIFGRSQVTTDVVRECLKRNIPIAYLSRLGYCYGRLIPIERGYRRLAHWQQALPEAWRLQTAAIVRAKLLNGRVLLMRQLRQRPSETRDLTLRSLEHLAAQALQATSLDQLRGIEGIGAALYFPELGNCLQQKGFVLIKRTRQPPTNPVNAMLSFGYMVLWNHLLTLIELQDLDPYQGCLHASSERHAALVSDLLEEFRAPIVDSLVLWLVNSGVMDIQEDFEYRDGGCFLSDAGRKKYLKAFLQRMEGSIQTPDGDQPRWDLLTQQVKKFKHSVYNPQDLYQPYRIR

SEQ ID NO: 1128 - DNA, 300 bp, Synechococcus sp
atgcccaaaaagaagatcaatgccaaagttctcagaaaccttgttacagccgtaatcaatggctcgattacactggccattttgctcattgctcccttggacctggcagccgtgattaccaacactattttggttgccattgccagcttcttttctggaagcttaacagagatggttatggatcttttgtcaagccctgaaattgacgtggaggttttgccagaagagcgccaatccaagaccagcacttccatagagccaaggcgaggctcagagagtctgcgtcgagatgatcaataa

SEQ ID NO: 1129 - protein, 99 aa, Synechococcus sp
MPKKKINAKVLRNLVTAVINGSITLAILLIAPLDLAAVITNTILVAIASFFSGSLTEMVMDLLSSPEIDVEVLPEERQSKTSTSIEPRRGSESLRRDDQ

SEQ ID NO: 1130 - DNA, 1959 bp, Synechococcus sp
atgactggcaatcgccctactcgtcctggcaacgctcctcagccgcttcctcgtccccccaggccaggggatcccagccgccggccgcctcaggaaaatcggggccctaattctcctagaggaggcaatggagggggaaaccagccgcgcggtggaggaggcaacaatcctccgccctcgccttggctgggtcaccccttggatcccacgcccaggccggatcccaccgctggctttattgaatatctgcgctggatgcgagcgccgcttgatgcttctaaagacggcaccaaagcggagctggcgcaccaagtggaaacaacgatcaaccttggagcccgcctgaaagttttgaatgagcgcacccaacgcattgccagcgacacctttcaggttacttgtccctggcgaattcgagtcggtggggccaagggtccagagagcatgttgctccccgctttcgatcccttagggatcccttacattcccagctccaccctgtgcggcgtggcccgctcccaggccattcgagagctgatgcaggagcgcaatttatcttgggagcaagcagacaaagccgtagctccttggtttgggcacctacaagctgacgaaaaagacagggccggcaaggttatctttttggatgcctacccggtacccactcggccccaacggcgagaggatcccgataattctaaaacggggggtctagctgtagatattgccaatagtatctggaaatggaatggaaaaaatcttgactactcgcctaaccctaacttgttcttttctctcaagcaagccacttttttaattggcctgcgcaaaggccccggctgcaccgatgagatgctggatcaagtcaaagagtggctgatccaagggctggagcaaggggtgggatcccaggtgaataccggctacggtcggctgatccccttagggaaatcactggacaagagccaaggagaattcttgcgcctgccctttgagctaaaaggccaactcattcacgggcggcaggtagtcaactggaggcccgataagaatcgctacgacaaccgatccatcgccgaagtgcggcccgtagcctttaagaatatgctgcgctattggttccgcacctttgccctgggagttttgccggtcgatcaggtgcaggagtgggaagggcaactttttggggccatcactccccagcaaaaacacggctggatccatgtggatttgctgaacggcaaagtctctcggccggagcccaatcagcgaggagaagccgcaggccaacaggaagggatcctcatcttaagtctttctggcgagtgtcaaaactatgcttcccaggaagatcaagaggcggtggaaaagctctttactaacctcacctggatgatgttccatctgggaggtgtgggtcaaggagctagaagaccctgctactcccgccagaaccgggagcgggctccctggtggcgcggctctaccctaattcccaggtcggaggatgccttttggaagctggcggagtcggtggccgggtttcagaagcttttccaaaagcgcctgggcaacttctttgacgctctcaagactctaaccaagcaggccattaaccccgatagcccaagaagtgctggccaggttcagagggataaatggccgcaagcggtggatgccaactgcaggatcgtagtctgcagcggcgaggaagatttcaacaaaccctatgccctggcaactttgcatcgcttaggccgacaagatgaaggccggtacgacaaattcttgtgcgggggtgtacagggaggtgctctgccctctccggtttggattgccgatttgggtgattaccaagtggttaccgtttttggggcaacggcagatcctaggaaaaagtatcttgaggagctcaagaaagatgctgatgattttcaagtaatctggcccttgagatag

SEQ ID NO: 1131 - protein, 652 aa, Synechococcus sp
MTGNRPTRPGNAPQPLPRPPRPGDPSRRPPQENRGPNSPRGGNGGGNQPRGGGGNNPPPSPWLGHPLDPTPRPDPTAGFIEYLRWMRAPLDASKDGTKAELAHQVETTINLGARLKVLNERTQRIASDTFQVTCPWRIRVGGAKGPESMLLPAFDPLGIPYIPSSTLCGVARSQAIRELMQERNLSWEQADKAVAPWFGHLQADEKDRAGKVIFLDAYPVPTRPQRREDPDNSKTGGLAVDIANSIWKWNGKNLDYSPNPNLFFSLKQATFLIGLRKGPGCTDEMLDQVKEWLIQGLEQGVGSQVNTGYGRLIPLGKSLDKSQGEFLRLPFELKGQLIHGRQVVNWRPDKNRYDNRSIAEVRPVAFKNMLRYWFRTFALGVLPVDQVQEWEGQLFGAITPQQKHGWIHVDLLNGKVSRPEPNQRGEAAGQQEGILILSLSGECQNYASQEDQEAVEKLFTNLTWMMFHLGGVGQGARRPCYSRQNRERAPWWRGSTLIPRSEDAFWKLAESVAGFQKLFQKRLGNFFDALKTLTKQAINPDSPRSAGQVQRDKWPQAVDANCRIVVCSGEEDFNKPYALATLHRLGRQDEGRYDKFLCGGVQGGALPSPVWIADLGDYQVVTVFGATADPRKKYLEELKKDADDFQVIWPLR

SEQ ID NO: 1132 - DNA, 642 bp, Synechococcus sp
atgggcgtcgcgatccccctgcaagcgatttccctgcaagaaggcagccgagtggttattcattctcttacctggcaagactgcgagagcattctggaggagctgggcgaagatcgccacactcgcattgcctactacgatggcacttttgagatcatgtctcctttatccaaacacgagcgccttcatcgcattgccagtgacattgtaaaggctctcttagatgctcaggggagagattgggaagactttggctcaacaaccctcaaaaagccaggcagagctggcgtggagcccgacacctgcttctatgtcaatcacctggagttggtgcgaggttgcgagggcaggatcgatgtcgatcagttgcccccacctgatctggccatcgagtccgacgttacttcccgaacttttatcgaggcctatagagccatcggcgtgccggaagtttggatcttgggtgagcgaagtttgcggatctttattctgcagggagaagactacgtagaatcaagctgcagctggctttttccagacttcgacatccccaagcttgtgcctcagctcattcaacgggccttagagattggcaccagcgctatgttgcgcaaatttcggcaaacccttggcaattcctaa

SEQ ID NO: 1133 - protein, 213 aa, Synechococcus sp
MGVAIPLQAISLQEGSRVVIHSLTWQDCESILEELGEDRHTRIAYYDGTFEIMSPLSKHERLHRIASDIVKALLDAQGRDWEDFGSTTLKKPGRAGVEPDTCFYVNHLELVRGCEGRIDVDQLPPPDLAIESDVTSRTFIEAYRAIGVPEVWILGERSLRIFILQGEDYVESSCSWLFPDFDIPKLVPQLIQRALEIGTSAMLRKFRQTLGNS

SEQ ID NO: 1134 - DNA, 393 bp, Synechococcus sp
atggaaacttttgatccccgcacgttggccaagcccgtttacgaatcccttcgccagttaagggctcaaaccaaagaccaagaaaagcttaaggagcagaaaaaccaggctgtggagctctacacctacctttccacctggggcctgctgcgccttaaggcagaagaagatgccctcaaccaggaagggaaaaaacaagtagtcaaggagttttttgattgcctagaagagatctctggccaaaagggaattgctaactccaacggcctggatcgtcttatgcaattgggagttgaagagtatctaggtttaacagggctaggtctggctttggctcaggaattcggcttttgggctatggccatctaccacgacattaaaggaggagagtaa

SEQ ID NO: 1135 - protein, 130 aa, Synechococcus sp
METFDPRTLAKPVYESLRQLRAQTKDQEKLKEQKNQAVELYTYLSTWGLLRLKAEEDALNQEGKKQVVKEFFDCLEEISGQKGIANSNGLDRLMQLGVEEYLGLTGLGLALAQEFGFWAMAIYHDIKGGE

SEQ ID NO: 1136 - DNA, 771 bp, Synechococcus sp
atggcctttcacctggtctatctcaccttgctgactcccctgcacaccggcggcaccacccaagaaggcaacctcttgggcattgcccgcgaggcccacaccaacttgccctacatcccttccagcaccatccgcggcaaattgcgggccagcgtggccgagaaagagttaaagtttgagctttttggcaacgaaattggggagggggatcagcttacccaaggctccatttggattggagatggatccctcttgtgggtgccggtggcttccctcagccacggggtagtctggattagctgccccctcttgctcaagcgctggctgcggctaagtggccagaagttgcaggtgccggagccctatagcaccaacttggaggcaaaccgacccatctatctcaaggatgccatcctaaagaacggtctaaagaagtgggaaaactggcaaagctttgtcaaatcttccagcatcagccgcgtccttgtcttgccggatcagcactgtgccacccttattcaaatgagcctgtggcggcaggtaaaagttaagctcagcgagcacaaagttgtagaaggcggctttcgctacgaagaggccatcccccccgatagcctgatgtactttacctggggggtaacagcccaggccaacggcagttcccaagaagcagtggagcaatttcagaagcttctccagaagaaccaacttctacaaattggcggccaagagagcctaggccggggctttgtcgagttgtcttggaactag

SEQ ID NO: 1137 - protein, 256 aa, Synechococcus sp
MAFHLVYLTLLTPLHTGGTTQEGNLLGIAREAHTNLPYIPSSTIRGKLRASVAEKELKFELFGNEIGEGDQLTQGSIWIGDGSLLWVPVASLSHGVVWISCPLLLKRWLRLSGQKLQVPEPYSTNLEANRPIYLKDAILKNGLKKWENWQSFVKSSSISRVLVLPDQHCATLIQMSLWRQVKVKLSEHKVVEGGFRYEEAIPPDSLMYFTWGVTAQANGSSQEAVEQFQKLLQKNQLLQIGGQESLGRGFVELSWN

SEQ ID NO: 1138 - DNA, 1125 bp, Synechococcus sp
atgagttggttcacgctatcgcctctagatgtgtggatgtttcgcgatgccaagccctttgcgccgggggagcgggcctgggccaatagcggctttccccccagcggccacaccttggccggcgccattctggctcacctgggccagccggcaaccctgcgcctatgcggccctttcctttgctgggatgagcagctttacttccccggccctctgcacctctaccagggatccccgctggtgcccatcccctggctggaagagggccattcctatgacggctaccgttgggatcccacccggcccgcccctttggtggcagcagctccggaggaggaacggccaagctccaagcaaaaggccgccggctacctgccctttcaggcggtgcaaactgcactgcagggcaagggctgggatctggagcaggcagtaaagtccccctgggtggcggaagtgcggccccacaacaccctgcaggcaggcaaacgccaggtgcgggaggccgagggctactttgtggaaacctgcatccgcctgcagcccggctggagcctggctctttccatcgagtgctgggatccagagcgcgaaagctgggatcccttgcccctagcgcaagaagtagtggtgcggctagggggagaaggccacgctgctctcctcagcccctgcccaaagctgggcaagcagtggcaagtgctgcaggagctctcccagcagaccttccggcaagcccgccgagctctggcctacctggtgacccccggcgtgttcatcaaaaaggtggaggggcgctccctctgccgcgcctggccctgggagtggcgcttggccacccctcatcctgcccactccctcaccggtcctctggtgagcgtggccaccggcaagccagttcccatcagcggtcgcctgcgggtggactccctaacagagccgcgcaagaccagcctaccggctccgcaagtctttgccgccccgcctggcagcatctactacctggagcatccagctccccttgcccaggacgagccggagctggaagatggccggctcaacgtcttccaccgctggcggcttctaggctacagcgagttgctctggctgccttgggcccattga

SEQ ID NO: 1139 - protein, 374 aa, Synechococcus sp
MSWFTLSPLDVWMFRDAKPFAPGERAWANSGFPPSGHTLAGAILAHLGQPATLRLCGPFLCWDEQLYFPGPLHLYQGSPLVPIPWLEEGHSYDGYRWDPTRPAPLVAAAPEEERPSSKQKAAGYLPFQAVQTALQGKGWDLEQAVKSPWVAEVRPHNTLQAGKRQVREAEGYFVETCIRLQPGWSLALSIECWDPERESWDPLPLAQEVVVRLGGEGHAALLSPCPKLGKQWQVLQELSQQTFRQARRALAYLVTPGVFIKKVEGRSLCRAWPWEWRLATPHPAHSLTGPLVSVATGKPVPISGRLRVDSLTEPRKTSLPAPQVFAAPPGSIYYLEHPAPLAQDEPELEDGRLNVFHRWRLLGYSELLWLPWAH

SEQ ID NO: 1140 - DNA, 2826 bp, Synechococcus sp
gtgggagatgcggatctggtcgcctccgccagcgatcgggctgctatcggccacctgccggttgccatcgactaccaggtagctgattgcagccagagcctggggccgggcttagagatgagccatctcctttcggggcgcaagcgcttttggcaactgcccgaagaagaacaccgcgccctgcggcaggccagctcccgcgccgagtacttgctggcgcaggaagcaagggtagttcccgactggatttggcaagaacaggaggatatccagaaggtgttctggtggttctggcgctgttttccccaggcgctggcgcgggagtttggcgatgaaagcctcctgcttttgccggcagaaacgcggctgcccgatggatccctgtggagccacactagcgtcgtggccgctctggcgggctgtttggccggctacgacgagcccaagttcacgcggccctttttggccagcttgaccttcaaccccatccaggagctgatcaaagccagccgcaagatgcgggacttttgggccggatcctggctgttgcactacctctcggcgcggctttgctggcgcctggcggagaaatacggccccgactgcctgctctaccccagcctctacggccagcctttgatcgacgcttggctgctggagaagtaccccccctttgccgagtggatcccgcagccttctgccaacactctgctcaccgccggcttccccaacgtgatcctcttgctgttgcccgaagagcggctgcaggcggccatgcagtttgcccagcagaccctcaaagaagaatggcgccacctggcggaaagagcgctggagcacctgcaactggagcgccgctggctggtgcagttgcgcccagaagatcccacctgggggggatggctggagcaccagtggcagttctactgggcggcagcgcccctgggatccccccagcaaaggctcaaagacaccgccatcctcaggtcccaggagtccattgagcgggatccctgggtcagcgcccaaaaccgcacctaccatctcaaaggaaagcggcagctttttgccgatccggagctgaagttcctgcggatcagcttctgggatcccgaaaggcagcagtgccgccagcacaagccagggctaaacgtaggctcctggtgggcagcggcagtggaggcgacgcgccggctgcaggcagcctgcaaacaggcccgcgattggcagttgccggtgacctttgggccgcgcagcaccgtctctggcctagggccggtggttcacccttcccccaggaatcgctggattagcgaaggggagagccggcggctttggcagcgccaggcagggcttttcgatggccgcgagcagctcaacgccaccgaaacggttaagcgggccctagacaaggtgttgccggagctcttccccaccctcgacgaagacgaggtcgccgcttcctacccagatctcactgctggcgtggccggttacctgaaaacccacgggcgacgcgagctggagcacttcgagcaggcctgccgcgccgttgaggccattcaccccggcatgcgggaggtgatccgggagatgcgtggcaagtgggggatcccgtgggccgaccagcaaaacctgcgctaccacccccgcctgctcaacgccggctggctggtggaggacctggaagcagacgaggcaacccagaagcgctgccgccaggagatagaagccaccctcagccgctactaccccagcatcaaccccgccagttggtacgtggtggccgccggcgatggcgacgacatgggccagtggctgagcggggggaagatgaagccctactacgactacctgccccagccgctgcagcgcctagcggatggccagagggacgctattggccgcgtcctcgactctgaagagctcaagcaagtcaaggacgccttcagcgagtttgttaaagccagccgcaagcgcatgggcccggccacccacagcgccctcagccgggctctgttggatttttccggccagttggtgccctacctcaccgagcagcgctatgccggcaggcttatctacgccggcggagacgacgttttggcctacaccaacctctgggagtgggatggctggctctgggacatccgccaatgtttccgcggcggcgaagacgactggcgcgagtttgccaacgaaggggactactggcagtggcaaaaggcgcagttgccggctggcctcagccgtcgccctctttttactctgggatccctggccagcattagctttggggtggtgattgcccaccactcggtgcccctggccattgccctggagaatctctgggaggcagaacaaggcgccaaagagcaggcctatgcccagggcagctccaaagacagcgcccaggtgcgggtactgtttgccaacggcaaccaactggtgagcacctgcaagttcgacaccttcgacaagtggaaagacctgctggattttgactggaagctgttgggccaaaagcaggatcaaagctccctatttgaacacgccgcccagctctgggagcagcacccagcccccagcctggaagcggtgcctgcttgggcccgcctgttctgcagccgccgggatctcttccacggcgaaagcgagcagacggatcgtttccagaccaagctggtcgagtttattcagcacttttggcagcacagcctgcccgcccagccgggggcctgggatctggccatcaaaaactggttcaagctggcggcctttgtgctgcgcaaccgcaccgtcactttggggaggaacggtcgatga

SEQ ID NO: 1141 - protein, 941 aa, Synechococcus sp
MGDADLVASASDRAAIGHLPVAIDYQVADCSQSLGPGLEMSHLLSGRKRFWQLPEEEHRALRQASSRAEYLLAQEARVVPDWIWQEQEDIQKVFWWFWRCFPQALAREFGDESLLLLPAETRLPDGSLWSHTSVVAALAGCLAGYDEPKFTRPFLASLTFNPIQELIKASRKMRDFWAGSWLLHYLSARLCWRLAEKYGPDCLLYPSLYGQPLIDAWLLEKYPPFAEWIPQPSANTLLTAGFPNVILLLLPEERLQAAMQFAQQTLKEEWRHLAERALEHLQLERRWLVQLRPEDPTWGGWLEHQWQFYWAAAPLGSPQQRLKDTAILRSQESIERDPWVSAQNRTYHLKGKRQLFADPELKFLRISFWDPERQQCRQHKPGLNVGSWWAAAVEATRRLQAACKQARDWQLPVTFGPRSTVSGLGPVVHPSPRNRWISEGESRRLWQRQAGLFDGREQLNATETVKRALDKVLPELFPTLDEDEVAASYPDLTAGVAGYLKTHGRRELEHFEQACRAVEAIHPGMREVIREMRGKWGIPWADQQNLRYHPRLLNAGWLVEDLEADEATQKRCRQEIEATLSRYYPSINPASWYVVAAGDGDDMGQWLSGGKMKPYYDYLPQPLQRLADGQRDAIGRVLDSEELKQVKDAFSEFVKASRKRMGPATHSALSRALLDFSGQLVPYLTEQRYAGRLIYAGGDDVLAYTNLWEWDGWLWDIRQCFRGGEDDWREFANEGDYWQWQKAQLPAGLSRRPLFTLGSLASISFGVVIAHHSVPLAIALENLWEAEQGAKEQAYAQGSSKDSAQVRVLFANGNQLVSTCKFDTFDKWKDLLDFDWKLLGQKQDQSSLFEHAAQLWEQHPAPSLEAVPAWARLFCSRRDLFHGESEQTDRFQTKLVEFIQHFWQHSLPAQPGAWDLAIKNWFKLAAFVLRNRTVTLGRNGR

SEQ ID NO: 1142 - DNA, 1320 bp, Synechococcus sp
atggctaaaacccttttgaccaccctgggcactggcgactacaccgagacgacgtatttctttggggagcaaagggcagacaaaacctgctacgtcgccaaggccctctgccagctctttgaaattgatagaatcatcctcctgctgacggaggaggcccgcgccaagcactggggccgcttgcaggagtccttgccaccccaggtggagaaggtggccaaagccattcctgagggcaaaacggaagcggagacctgggagattttcgacgtgctggtcgatggcatcgagcccaacagccggctgctttttgatatcacccacgcctttcgctccatcccgctgctggtgctcttgggagccgcccttttgcgcaaggccaaaaatgtcgagatccaggggctctactacggcctctaccgccctggccaggcggagacccccattatcgatctcacgccggccattcggcttctggactggctgacggccagcgacaagttcatcagcaccggctcggcagtagagctgggccagcttttggacaccgttcaacgggacttctaccgacagcaaaggcccggcaaaggggatcccaggcccacccggctgcagagctttggacaagccatccgcgacatctcccgttctctggagctggtgaggccggtcagcctgcaggaggacttgcgcaagttacaaagacactctacccaggagttggcagaagaggtgggccaatttgccaagcccttcggcctgctgctgcaaagcattcaaaatagctacagccaactggcgctgccggcagaaaaggcggcggatccccaagcgcaagttcaaaagcactttcaactgctgcgctggtatgttgaaaagcgcttcaccacccaagcccttctcttggcccgcgagtgggtggtttctgccctttgcctctgtgaggggatccaaaactacctcgaacgagaagcgcggcagggaattgaacaccagttgggatcccttatcccgcgggaagagcagctcttgggagatctccctgcgactggatcccttatccaacaccaagagcagcttcagtccctgcctcccattgccgcccatgtcccagatgtgcagcagctagctaagctctggtctcggctgagcgaataccgcaacgacgtggcccatgtgcagatgaaacccaaatctctacgcagcgaagttctggagagctttgtgctgcaggatctgctgccgaaactggaagcgctgtttcctgaattgactcgaacagagggggaattggaaggggatccttccaattctcggtag

SEQ ID NO: 1143 - protein, 439 aa, Synechococcus sp
MAKTLLTTLGTGDYTETTYFFGEQRADKTCYVAKALCQLFEIDRIILLLTEEARAKHWGRLQESLPPQVEKVAKAIPEGKTEAETWEIFDVLVDGIEPNSRLLFDITHAFRSIPLLVLLGAALLRKAKNVEIQGLYYGLYRPGQAETPIIDLTPAIRLLDWLTASDKFISTGSAVELGQLLDTVQRDFYRQQRPGKGDPRPTRLQSFGQAIRDISRSLELVRPVSLQEDLRKLQRHSTQELAEEVGQFAKPFGLLLQSIQNSYSQLALPAEKAADPQAQVQKHFQLLRWYVEKRFTTQALLLAREWVVSALCLCEGIQNYLEREARQGIEHQLGSLIPREEQLLGDLPATGSLIQHQEQLQSLPPIAAHVPDVQQLAKLWSRLSEYRNDVAHVQMKPKSLRSEVLESFVLQDLLPKLEALFPELTRTEGELEGDPSNSR

SEQ ID NO: 1144 - DNA, 30 bp, Thermoanaerobacter tengcongensis
gtttttagcctacctaagagggattgaaac

SEQ ID NO: 1145 - DNA, 978 bp, Thermoanaerobacter tengcongensis
atgataaaaaatttttcaaatttaatagaaacagtgtacaaaaatgattcagagattacctgggagaagtgtgaaaatttttctctagcattttcaaaattaataaggagagaattaattgaaggtacagaagggaagagaaaaaacatattcctaaacagtcttaccagatactccataaagggaatagatattgttaatcttttttctcgagttaatcttcaaattgaagacctttctaagcaaggctaccaaccaattttaagacaatacaagattacaactgcttccagattggtaataggtttaggtgcagaacatcctctagaaacttctcttacaatacaccacatatttggaataccttatattcctggtactgctttaaaaggtgtttgtaggatggtaagtttttgggatatagcaatagaagaagcgaggggtgaagagatagaagaaggggaaattgagaatttacaaaaggagctttatgaaggtttgatttttgatagatcttcttctgataaagggaaagaagattcgccaaaaagagttttacataaattgctttttggtacacaggattttaaaggattgcttcttttccttgatgcctttccggttatcaataacaatgtttcgcttttcgatgtggatataataaatgtacattataaaagttattacggcgatgatacagggaaaacggcaccaggcgattgggaaaaccctattcctataccttttctgaccgtgaaggagaatactagttttcagtttagtgtgctttttgacagagtccgttttgaagaactcataaaagaaaaaattccaccggaagtgaaaggggcaatagattttttgaacgattgcacccgcttacaaaagttggtagaaaactggataaagaaagctcttactgaatttggtataggtgcaaagacaagattaggatatggatatttcaaaatcctctga

SEQ ID NO: 1146 - protein, 325 aa, Thermoanaerobacter tengcongensis
MIKNFSNLIETVYKNDSEITWEKCENFSLAFSKLIRRELIEGTEGKRKNIFLNSLTRYSIKGIDIVNLFSRVNLQIEDLSKQGYQPILRQYKITTASRLVIGLGAEHPLETSLTIHHIFGIPYIPGTALKGVCRMVSFWDIAIEEARGEEIEEGEIENLQKELYEGLIFDRSSSDKGKEDSPKRVLHKLLFGTQDFKGLLLFLDAFPVINNNVSLFDVDIINVHYKSYYGDDTGKTAPGDWENPIPIPFLTVKENTSFQFSVLFDRVRFEELIKEKIPPEVKGAIDFLNDCTRLQKLVENWIKKALTEFGIGAKTRLGYGYFKIL

SEQ ID NO: 1147 - DNA, 408 bp, Thermoanaerobacter tengcongensis
gtggttgaaggtttaaaagttaaaacacttgagcaagaaagagcaagtttttgccttaaagaaatagaagaattgcctaaaggaaaagacaaaagggacaaatataaaacaaatgctagaagactgccagcttttattgtttcaaatggtttaattcctaccctggctttttacaaatccaaagaggagaccaagccggtatatgacacattgaacaaatggttacaaaaaagaggatacatatcagagaataaagacgctcttgatgaacttgtggacaaagattttcaaattctgcggttagctaccacagaaattttagccctggcaaattggctgaagagaacggttgaaattgaaataaaggaagaaaaagatgatttgtctggggagagggaagaacaatga

SEQ ID NO: 1148 - protein, 135 aa, Thermoanaerobacter tengcongensis
MVEGLKVKTLEQERASFCLKEIEELPKGKDKRDKYKTNARRLPAFIVSNGLIPTLAFYKSKEETKPVYDTLNKWLQKRGYISENKDALDELVDKDFQILRLATTEILALANWLKRTVEIEIKEEKDDLSGEREEQ

SEQ ID NO: 1149 - DNA, 1050 bp, Thermoanaerobacter tengcongensis
atgtataaagaagctgctttgattacattttatgctgaaactcctgttcatatgggcgcagggcagagcgtatcttatgtggacctgccaatccagagggaaagacatactgctttcccaattttctggtctagcggaatcaaaggagttataagggatacttgctacagaatttggaaagacaaagataaagtgaatcttatatttggtccagaggaagattctgactttgctagctgtataagcattacagatgcaaagattttgctgtatccggttcgttctgttagaggcgtgtgtgcatggattacctgtccttttgtattgaagagatttaaagaagaattggaaagtgcaggaataaatgaagttaataaaaatttcgaagtgattgataatttacacttaaaagatggagaggcagtgattccaaaagaaagtatttcagttttagggataaatgataaacaagtggcttttgaagagtttgtattttctatgaaaaacacgtcggagaatatttcagaagttgtcaagtttataaaaaacttgcttcctgatacttcccttacaacagatattgaaaaacattttgccattgtatcagatgacacgtttagagattttgtaaattatgctgttgaagtgaggacaagagtgagaattgaccaaaagacagggacagtgaaggagggagcattgtttactgaggaactcataccctctgagagcgtattttattcacttttatttattagtgacccttattttggaatagatgatgaattttatagctgccttcttgaagtgaaagaaaagacccagggaaaacttaactgggaagaagcaaagaataagattgagaaaaaagaatggctggaaaaggtaaaaaataaagaattttatcttaaaaaagcttgggaagggaattattttaactctgcagaagttttaaataatttgcatgaaatattaaatggaactattcttcagcttggaggagatgaaactacagggaaagggtttatgagggtgaaaatttctctttaa

SEQ ID NO: 1150 - protein, 349 aa, Thermoanaerobacter tengcongensis
MYKEAALITFYAETPVHMGAGQSVSYVDLPIQRERHTAFPIFWSSGIKGVIRDTCYRIWKDKDKVNLIFGPEEDSDFASCISITDAKILLYPVRSVRGVCAWITCPFVLKRFKEELESAGINEVNKNFEVIDNLHLKDGEAVIPKESISVLGINDKQVAFEEFVFSMKNTSENISEVVKFIKNLLPDTSLTTDIEKHFAIVSDDTFRDFVNYAVEVRTRVRIDQKTGTVKEGALFTEELIPSESVFYSLLFISDPYFGIDDEFYSCLLEVKEKTQGKLNWEEAKNKIEKKEWLEKVKNKEFYLKKAWEGNYFNSAEVLNNLHEILNGTILQLGGDETTGKGFMRVKISL

SEQ ID NO: 1151 - DNA, 1134 bp, Thermoanaerobacter tengcongensis
atgataaggtttaaaattaccccttacgatgtgtttttctttggctcgggaaggccttttaatgtaggtgatgtagtatattccatttttcctcatcctcacacacttgcaggggctatttgtacaaaaattcatgcgcatacaaaaattgacacatcgaggattttgaaaaatgtttatggcccttttattgaaagaaacgggaaactttattttcctaagcccagtaatattttgggggagagaaaaaaagaagaaattgaaaatatatttcatgctcgccattatgaattaaatactaagctttttaagaaagaaaatactaatgctgattctaacattaaaacatttccgctgtatatgggtaaagaggatataggaacttttccggcttttatttctatagaagggctgagaaagtggctcaaaggggagaaaatagaaatacatgaaatacttcagtataaagaaattttcacaaaagaagaaagacttggaattaaaatggatagcacagtgaatgcagtagggggagaagaagacgcactttatagaatagaatttatgagattaaaggaagatgtaaatctcattgtgtgggtagaatttgattttgaagctgaagagattaaaaaagcaggtttttcagatgaaagcaaattgaggggattttttaatcaaccgccaagagctttaaaaataggaggtgagatgaaaaacgccttctatgaagtggaggaagaaaattttgtggaatttttgagagaaaatttgggagtttcacaaatggtagaagtaaaatgtggagatattgtaaaagttttatttctgacccctggagtttttcctgattttaaattttccgtggaaggatttgaagtgttttcactggctctagataaatacacaattgtagggaggtactcacccaaattaaaaataacgaagactgtgagggcttttccaagtggcacagtgatgtggtttaaagcgaaagaggacatgcttttaatgaatccggctttcattgtacctgagggcaattatcattcttttaaaattccaagtggtgagcaagaatttattggctctaatctaattctcattggcaaggaggaggtaaaagatgtataa

SEQ ID NO: 1152 - protein, 377 aa, Thermoanaerobacter tengcongensis
MIRFKITPYDVFFFGSGRPFNVGDVVYSIFPHPHTLAGAICTKIHAHTKIDTSRILKNVYGPFIERNGKLYFPKPSNILGERKKEEIENIFHARHYELNTKLFKKENTNADSNIKTFPLYMGKEDIGTFPAFISIEGLRKWLKGEKIEIHEILQYKEIFTKEERLGIKMDSTVNAVGGEEDALYRIEFMRLKEDVNLIVWVEFDFEAEEIKKAGFSDESKLRGFFNQPPRALKIGGEMKNAFYEVEEENFVEFLRENLGVSQMVEVKCGDIVKVLFLTPGVFPDFKFSVEGFEVFSLALDKYTIVGRYSPKLKITKTVRAFPSGTVMWFKAKEDMLLMNPAFIVPEGNYHSFKIPSGEQEFIGSNLILIGKEEVKDV

SEQ ID NO: 1153 - DNA, 921 bp, Thermoanaerobacter tengcongensis
atgagaaattacgagtgtaaattgcaaatagtgactccaataataatgagtggtgcaagaaaaaatttgcttgaattaagagagcaatctattaacggtattctgagatggtggtttagattttatggaagtttgaaatatcaaagtcttcaggaactgcgaaaaagagaaagtgaaatttttggttccacgaccaaagccaaaagattttatataaagatccttcaagaaccacaaagtagaggaaaagcatacttgtgcatgaatgacaggagaaaaaaaggagaaaagggtgctgcagtgaattacagtgaaagggtaaggacttcttacgcacctaatcaagagtttattttaaatttcaaatttatgcctcattttccaaaagaacatgaaaaagagcttaaaaattcgctgatgtgtttaagtttatttggtggtattggtgctagatggaggagaggttttggaagtataattgtaaaagaatttgctttttatggtgaggaattagaagggattggaaaagaaataaataagagattagaagaattaaatataaaaaacagcttaaaaattaaaccttttgaagaatttattaattttagaaatacaaacatattcttaatcaaacctaaaaatagtttttgggattcttatgaaagtgcgatgaatgatttgcgtgataatttctatagagctctaaaacatgagctaaaaatttcagagctttcttattctcctagagaaagcagaagaaaagcttctcctttaataatacaaataaagaaaaatgtaaaaaatcattactttggagtgattttaatatggcaagagtggcctcaaaaaaaagcagctgaagattttttaacaaaattagaaaagtacgaatttatagggattaatcttccaggagagtga

SEQ ID NO: 1154 - protein, 306 aa, Thermoanaerobacter tengcongensis
MRNYECKLQIVTPIIMSGARKNLLELREQSINGILRWWFRFYGSLKYQSLQELRKRESEIFGSTTKAKRFYIKILQEPQSRGKAYLCMNDRRKKGEKGAAVNYSERVRTSYAPNQEFILNFKFMPHFPKEHEKELKNSLMCLSLFGGIGARWRRGFGSIIVKEFAFYGEELEGIGKEINKRLEELNIKNSLKIKPFEEFINFRNTNIFLIKPKNSFWDSYESAMNDLRDNFYRALKHELKISELSYSPRESRRKASPLIIQIKKNVKNHYFGVILIWQEWPQKKAAEDFLTKLEKYEFIGINLPGE

SEQ ID NO: 1155 - DNA, 1434 bp, Thermoanaerobacter tengcongensis
atgaaagttatatatcaaattggaagatttgataagggttttatgaaaactcaagaatttacttttcggcaagaaaaatatacagaagttcttacaagttttgttatgaaaaaattttttcaaaagaaaaatcctcaagaaaaaagtatggtagtgttgatttttcctgtgagtttaattttaaatgaaagtgctattaaggaagtgattgaaagcaacgacgaggcaatagagaaatttaaagaaaaacttgaaagatttaaagatatggttccaaatacactgcaggagtactctaccgatccttacgcgttttatagttttcacccacactgcaaaattgcggatgatttctttgttatccattcgttaggaggatataaaatttttggcgaatatatagaatttaattctgactacaatgatatagttttacaaatttttagtgacatggctataaggtatttaaatgaatacaacagagataatgaaacaatggagttttacattgatatttctagcggacacaatatttatatttcagctttgttggaagcagcaagatatttttctgtgttttctggtcttttaaattggcttaaaaaagaaaagaggccaaaaatatttttagcattttcagatcctattttgccaggaacgacaggaatgaaagaatatgaaatacacattgaagaactacgctttaaaaccttcttttcttctcctataggggaagaagaactagataatttcaatttagctcgaagaatagcaggaaaagaaaaggagttaaaaaatgttctccaaaagctatttgaaaatttcctcatctgtttttctgctattaaaaataatacgccacttgttttgtatcatttcaattttgatgcttgggaagatgtaatttcatttttaaaagattttttagaaatgctcaaacgaaaactctcaggtacatgggaaagttcaccagtgcttttcaaatctgattatttaaacactattttatctttaggattttatgcaggaattttagaagttttagagactaagggtatatcaaaatatgactatgaaaatggaattgcactcgaagagataaagcaactctttgcctctgaagagaattctatttataagttattcggactggaaactcatattccaattttggggagggaagttcataatttatgtcatggagggaaaaagaaagaaaaatctattttaaatcaagctacggaagagtggagtaaggtttataactttatagatgaaggaaaatccagctcttttgagaacagaaattttttagctcatagtggttttgagagaaatgtcacggaagtgagaaaagaagaagggaaattgtatttaagatatgacaagagttttgaaaaaaagattttaaagtgtttaaaaaagtatgtgtga

SEQ ID NO: 1156 - protein, 477 aa, Thermoanaerobacter tengcongensis
MKVIYQIGRFDKGFMKTQEFTFRQEKYTEVLTSFVMKKFFQKKNPQEKSMVVLIFPVSLILNESAIKEVIESNDEAIEKFKEKLERFKDMVPNTLQEYSTDPYAFYSFHPHCKIADDFFVIHSLGGYKIFGEYIEFNSDYNDIVLQIFSDMAIRYLNEYNRDNETMEFYIDISSGHNIYISALLEAARYFSVFSGLLNWLKKEKRPKIFLAFSDPILPGTTGMKEYEIHIEELRFKTFFSSPIGEEELDNFNLARRIAGKEKELKNVLQKLFENFLICFSAIKNNTPLVLYHFNFDAWEDVISFLKDFLEMLKRKLSGTWESSPVLFKSDYLNTILSLGFYAGILEVLETKGISKYDYENGIALEEIKQLFASEENSIYKLFGLETHIPILGREVHNLCHGGKKKEKSILNQATEEWSKVYNFIDEGKSSSFENRNFLAHSGFERNVTEVRKEEGKLYLRYDKSFEKKILKCLKKYV

SEQ ID NO: 1157 - DNA, 1368 bp, Thermoanaerobacter tengcongensis
atgtttcgacaactactacccgttttccttcttactcatttattaaattttttgcttaaaatttctctattcgctctcaaacactttaaagtagatattcagccgcctgttgacctccaaccttcaggctacaaagttttgtcacctttagaggatcctttgccacttgttgaaaaagttgttgagaaaaaagattacaagaaaatccttgccgaagctgaagctcaaggtaagcctatctctcatgttagacgtattaaacccctttgtgttgatgttgataagtgccctgtttgcggtgcccctcctgattatttgtacagttttggtaaagaccctgacggctttcaaaaactacagtgtaaagtgtgtaaacatcaatgggctcctggtaaacctgctcctaaaaagtctcgccctacttaccgctgccctttctgcgggtctgcacttattcaggataaaactagaaagaattttactgtgtttaagtgtcgcaatgataattgccctaagtggcttaaccaccgtaaaagatatcgcttcagagcttttgatgttgattttgatgaactctcttcttcttctccaaatgctgcccctgttaacctcgcaaaaagccattttagcccattcttgatagcacaaactgttaatttatacgtaggtctcggtctttctttaaggcaaactgtctctgcactacagcatatatggcaagttcaactctctcatcagactatacaaaactgggtggtttccttggcctctaaactcgctccgcttgttaagtctatcaacctccctttgtcaggccttgttgttattgatgagacttacataaaggtcaaaggtaagtggcattacctttttactgcctgtgatggcttgagaggttttattatctcacagcacctttctcctcatagggatgctttagctgctttgacaatccttaaagaggtcattgaccgttacaacaaccgagaattcattttagtcacagataaagcgcctatttatgatgtggcagtccatttcgcttcggttttctttggagccaatatccgtcatcgacctgtgttgggaatctctcctccacccggtggtgacagtcatacttacagaccgtataaaaaccgtttagaacgcttatttggctcttacaaggctcattacaagcgccataagtcttttagttcttttgaaggtgctatcgctcatgcattgctatatcagctgtactacaatcacttgaaacctcatgaggcttccgatggcaaagtacttgcaccccttaaagataaacatggccaccaagtggataattgggctaaactgattcaatggtttgttgagcttaattaa

SEQ ID NO: 1158 - protein, 455 aa, Thermoanaerobacter tengcongensis
MFRQLLPVFLLTHLLNFLLKISLFALKHFKVDIQPPVDLQPSGYKVLSPLEDPLPLVEKVVEKKDYKKILAEAEAQGKPISHVRRIKPLCVDVDKCPVCGAPPDYLYSFGKDPDGFQKLQCKVCKHQWAPGKPAPKKSRPTYRCPFCGSALIQDKTRKNFTVFKCRNDNCPKWLNHRKRYRFRAFDVDFDELSSSSPNAAPVNLAKSHFSPFLIAQTVNLYVGLGLSLRQTVSALQHIWQVQLSHQTIQNWVVSLASKLAPLVKSINLPLSGLVVIDETYIKVKGKWHYLFTACDGLRGFIISQHLSPHRDALAALTILKEVIDRYNNREFILVTDKAPIYDVAVHFASVFFGANIRHRPVLGISPPPGGDSHTYRPYKNRLERLFGSYKAHYKRHKSFSSFEGAIAHALLYQLYYNHLKPHEASDGKVLAPLKDKHGHQVDNWAKLIQWFVELN

SEQ ID NO: 1159 - DNA, 1284 bp, Thermoanaerobacter tengcongensis
atgaagtataaacaaaatgaaaagattttgcaagtaacgggagacacattaattgcgggagtagacatagcaaaagaaagccattatgccagagcatttgactacagaggagtagaatatgggaaatacctgagatttgaaaacaatagagaaggtatgacaaaatttcttaactgggcaaaagacttgatggagagacataagaaaaacaaactaatagtagggatagaaccgacagggcaatattggctgtgttttgcccaataccttaaagacaataacataaaggtagtattggttaatccatttcatgtaaagatgagcaaagaattagatgacaattctcccacaaaaagcgataagaaagacccaaaaacaatagcaatgctagtaaaagacgggagatatgtagagccgataatacctgaaggagtatatgcagaattaagggtagcgatgggcataaaagacaggttgaacaaacaaatagggatgacaaaaaatcaaataacaagatggttggacatatactttccagagtttaacaccgtattttcagactgggaagggaaagcagcacttatcacattaagagaatttccaacgcctgagaagatagcaaaaaagagtgctgaagaaataatatcgatatggaagaaagaagtacaaagaggggtaggagaaaaaagggctataaagctgatagaaactgctaaggagagcatagggaagaagcagggcataaagatggcggaatacgagataaagactctcattgaacaatacgaatttttaaaaaaacaaattgaagaaatagagaagaagatggaagaattaatagttgagataccaggggttaaagaactactagaaatcaaagggataggagtaaacacagtagcaggttttattgcagaagtaggagatattgaaaaatatgaacatccaaaacagatacaaaaactagggggattaaacctaatagaaaatagctctggtaagcataaaggagaaacgacaataagtaaaagagggaggaagcgattgaggagtgtgctatttaatgcagtaatggccttggtcgcaaaaaacgaagaatttcgtgaactacacaaatattacaccaccagagcgcaaaacccgctaaaaaagaagcaatcactaatagtattgtgcaacaaactgataaggatattttatgtcatattaaagaaaggagtaaaatatgacccaatcaagatgatgaaggacataaagaggccaggcttacaggaagctgcataa

SEQ ID NO: 1160 - protein, 427 aa, Thermoanaerobacter tengcongensis
MKYKQNEKILQVTGDTLIAGVDIAKESHYARAFDYRGVEYGKYLRFENNREGMTKFLNWAKDLMERHKKNKLIVGIEPTGQYWLCFAQYLKDNNIKVVLVNPFHVKMSKELDDNSPTKSDKKDPKTIAMLVKDGRYVEPIIPEGVYAELRVAMGIKDRLNKQIGMTKNQITRWLDIYFPEFNTVFSDWEGKAALITLREFPTPEKIAKKSAEEIISIWKKEVQRGVGEKRAIKLIETAKESIGKKQGIKMAEYEIKTLIEQYEFLKKQIEEIEKKMEELIVEIPGVKELLEIKGIGVNTVAGFIAEVGDIEKYEHPKQIQKLGGLNLIENSSGKHKGETTISKRGRKRLRSVLFNAVMALVAKNEEFRELHKYYTTRAQNPLKKKQSLIVLCNKLIRIFYVILKKGVKYDPIKMMKDIKRPGLQEAA

SEQ ID NO: 1161 - DNA, 2730 bp, Thermoanaerobacter tengcongensis
atggaaaaagtatggcttctgaaacttaaagcttttcttcatgaccctcctcataagcattggataatttctatggacaatgaagaatgtataaaaaagttccagcttcaggaaaaaggtcgatgccatgagattttaattaaatctaaagtaattgaaccacttcttggagaagatttaacagaggaagaagagaaacttattgaaaaagcagatacacaagcttatcctgtaaatagaatacttcccccagtggctgttaaaataagaggagaagatgtgatattttttgacatgtttaataaaaaaatatattacgatatactggcagaaacagattatgaaactgagaataagcgttttttagaattagtagagaagcttgcaaagaattataacctttctaggataaaggaagaagaaaaaaaagaaaaagccaaaatcttgcttttatttctatggagattctaccaagaaatttttcactggatgagaatccatcctgcagatacaagggcgcccaatcactccatctatgatcaccttgtccaaacttctactctggtttcagcacttcccaaaccagcatttttgctctttacaattggccctgttcagagctttattgctacggcgagaaaaacttctgatttatgggctggaagttatatgctttcttactttatatggaaaatcatgaagtttgtagttgaacgttatggggcagatgtgattgtgtacccaaatcttttaggtcaacctcttgtagatttatggcttagttcggaggtatttggtaattcgcttactcatttatcacaaaaggaatttgatgaatggtttaaagagtggaataacattccaaggtctaagggtttggaagaaaagttgactattgccaatatgcccaacagatttcttgcaattgcgccaattaatgaaggtgaagctttaaaactgggcgaagagtgcgagaaaaactttaaagaacaactaaagagcctagcaaaaaagacagtgaaaagattagaaagtattttaaatctagagggggatttagagaaaattcaattgcagattgaaaatcagctattaaattatttccaggtttactgggcggttatgccatggtttgaagagaaagagtctccaaaagaggttttggatgattacaaagaaataataggagagacagagctttacaaaacgataagtgagtttatagaatctgttcctaagatatggagtaaaaataaagaaaaagatgaggaatacagagattttagcatagcctattcattacttcttgagctaactgaaaaattgcttggagcgaggaagagcataagggaatttgaacagttagaacaaaaagggcgtaagtgcagtttatgtggagagtttgaagttttgccattagattgggaaaaattgaggagtaaggaaaaaggcttggtaaaagaaaaagagcaactctgtggagtgtgtcttgcaaagcgattattcccaaaggtaatgaaggaagagctaaatctttccgaagaaatgaaatttccctcaacttctgaaatggcaactattggagaaaaaaggagaattgctgacaacaaagagtttattgcagagttcaaggaattatttggagaatttaaacagaagcttttgcttcccaatactgtttctgttccgaaattaaaagataaccaactttttgaaatagatggacagtggttgatgagggagagttatagagaagaatatattaaaagtgagcatacagagaacttcaaagtagaggaatttcagaagatgtctcagaaaataacaaagcttttagaaaaacacagggtcaacccttccagatattatgctattcttcaaatggatggggaccacatggggaagtggttaaaaggagagaataatccacctataatggaaactttacaccccaaagtgggagaacatataaaacaacatgcaaaagataacctatcttcgatactttgtaagaaacaccctactactccttctcttcaccagaccttgagtaggaaaatttccacgtttgctcttcaagaagtgcgaagaattgtagaagaaacacattacgggaaattggtttatgcaggaggagatgacgttctagcattacttcctgtagaagaggtgttggaatgtgcttatgaattgcagaacgcttttaaagaagttttaagttctgaagcctccatgagtgcaggcattgtaatagttcatcacaaatatcctctttaccttgccttgaaagaggttcaattggctcagaagaaagcaaaagacgaaagacagtataatagaaatgctttttgccttaagtttataaaaggaagtggagcactaaaagaatgcgggggcaaatgggcgttgatggattttttgagagaactcatagagcatttcaagaaaggagaattttcatccacttttccctatcaattttttgaggtagtagacagattgtatgatgacgaaaataaagaacaaattattgggattttgagaaatgaattaaagagaatatttcttcgtcagagtggaaacagagatattttagaaaaatatgctagtgagatattgctcccaaagtttgatgagatagttaaagaaacgccagatagagtgatagattttgctaatatgttgattatagcaaggtcaattgcaatggagcattcctgtaatgaataa

SEQ ID NO: 1162 - protein, 909 aa, Thermoanaerobacter tengcongensis
MEKVWLLKLKAFLHDPPHKHWIISMDNEECIKKFQLQEKGRCHEILIKSKVIEPLLGEDLTEEEEKLIEKADTQAYPVNRILPPVAVKIRGEDVIFFDMFNKKIYYDILAETDYETENKRFLELVEKLAKNYNLSRIKEEEKKEKAKILLLFLWRFYQEIFHWMRIHPADTRAPNHSIYDHLVQTSTLVSALPKPAFLLFTIGPVQSFIATARKTSDLWAGSYMLSYFIWKIMKFVVERYGADVIVYPNLLGQPLVDLWLSSEVFGNSLTHLSQKEFDEWFKEWNNIPRSKGLEEKLTIANMPNRFLAIAPINEGEALKLGEECEKNFKEQLKSLAKKTVKRLESILNLEGDLEKIQLQIENQLLNYFQVYWAVMPWFEEKESPKEVLDDYKEIIGETELYKTISEFIESVPKIWSKNKEKDEEYRDFSIAYSLLLELTEKLLGARKSIREFEQLEQKGRKCSLCGEFEVLPLDWEKLRSKEKGLVKEKEQLCGVCLAKRLFPKVMKEELNLSEEMKFPSTSEMATIGEKRRIADNKEFIAEFKELFGEFKQKLLLPNTVSVPKLKDNQLFEIDGQWLMRESYREEYIKSEHTENFKVEEFQKMSQKITKLLEKHRVNPSRYYAILQMDGDHMGKWLKGENNPPIMETLHPKVGEHIKQHAKDNLSSILCKKHPTTPSLHQTLSRKISTFALQEVRRIVEETHYGKLVYAGGDDVLALLPVEEVLECAYELQNAFKEVLSSEASMSAGIVIVHHKYPLYLALKEVQLAQKKAKDERQYNRNAFCLKFIKGSGALKECGGKWALMDFLRELIEHFKKGEFSSTFPYQFFEVVDRLYDDENKEQIIGILRNELKRIFLRQSGNRDILEKYASEILLPKFDEIVKETPDRVIDFANMLIIARSIAMEHSCNE

SEQ ID NO: 1163 - DNA, 29 bp, Thermobifida fusca
gtgagccccacgcacgtggggatggaccg

SEQ ID NO: 1164 - DNA, 1785 bp, Thermobifida fusca
gtggacggccaagacctcgtggtgatcgcactgtccggagtccagcgattcatcgaagaatccagaagcacctcggacctgcgggcaggcagccgaatcatcgctgagctcaccgaacaagccgtgtccgtgtgccaggagtccgctgccgaactcgtcttccccgccccgagcaagaaaaggaaagacgtgggaatgcctaaccgggtggtggcactcgcccccgcagggcaggggacgacacttgctcagcgagccaccgcacgggtgaatgagaagtggaaggagtggttgcaaaagactcttggccgtatcgaagaaacccccggtatgcccgccgtgacgtgggccgtagctcccccacggccaggcggctaccccgaacagtggaaagaagcccaacgtcgcctagccgcacgcaaacaggtccggaacttcaccgccctggaggcacgcaacggcccctgccagctgagtcctcactggcccgcgaccacgaagccaccgaaaggtcttccctcttttgagcgtgacacgctgagcgctgccaactggctgaaacgcaagcttggccgccccaatgataaggagagcgtgtcaccttacgggatcccctcgacctacgggatcgcgtcggccccattccgcatcgaagttctgaaaaatatcaacgatccggatgtaactgaacaggtggactacttgcatcaagtagtccaggacgaagatacgggcatacatatccccaactggccactgccaggcatgccgaaacctcagggagaattagcccagtggctgtggcggcacggaggacagtgggtttacacagactcatggtccgcagagtcgctggcccgcgaattcaggaagccgacttctggagaagcattcgacaacttctccagaacagtagagataggccgtattgctgccgctgatcttcaaaagatcatgcgggacaagttccaggtagcgcctccctcctcctacctggcgattcttgtccaagacctggacggcatgggctcctacctctccgaggaaaagaacctgtcgcacaagcggcacaccgaaatttctgaccagttgcggagagtcgctgaaaggcagacagaactgctgcacgactcggcgctgctgggcgttgcagtctatgccggcggagacgacctgctggcgttccttcccgcagcgacagcccttgcgggggcacgcgcctgcagacaggcagtcaccgaagtatccccggaactgcccacggcgagcagtgccttactgttcttccaccgcaaatacccgttgcggctcgccttggccgcgagccgggaagccctggctgccgccaaaaacgttcctggaaagaacgctctcgccgtgagctacctgcgccgctccggaacccaggaaacatacgtccagaaatgggctcttcctgaccacaacgatcccgaggccttggtgtgtgaccgcctgtccctcttcaccaggagtgagacgggagcacggctatcccccgggctactgcgggacctggaacgcgacagtcacgccctatgcacgctcagtctggacctctttaccgctgagctccagcgcctcgtccaccggcatactctcgcgcccaccagcgagcaacaaaaagcatttgccctcaaggctgcagagcagctccgccttctgggacggcccaccagcgccctagaagactcagaaaagatttccgaacaatcactgatcgcggcggctcgagtcgcagtgttcttgcgtcaggagtgccgatga

SEQ ID NO: 1165 - protein, 594 aa, Thermobifida fusca
MDGQDLVVIALSGVQRFIEESRSTSDLRAGSRIIAELTEQAVSVCQESAAELVFPAPSKKRKDVGMPNRVVALAPAGQGTTLAQRATARVNEKWKEWLQKTLGRIEETPGMPAVTWAVAPPRPGGYPEQWKEAQRRLAARKQVRNFTALEARNGPCQLSPHWPATTKPPKGLPSFERDTLSAANWLKRKLGRPNDKESVSPYGIPSTYGIASAPFRIEVLKNINDPDVTEQVDYLHQVVQDEDTGIHIPNWPLPGMPKPQGELAQWLWRHGGQWVYTDSWSAESLAREFRKPTSGEAFDNFSRTVEIGRIAAADLQKIMRDKFQVAPPSSYLAILVQDLDGMGSYLSEEKNLSHKRHTEISDQLRRVAERQTELLHDSALLGVAVYAGGDDLLAFLPAATALAGARACRQAVTEVSPELPTASSALLFFHRKYPLRLALAASREALAAAKNVPGKNALAVSYLRRSGTQETYVQKWALPDHNDPEALVCDRLSLFTRSETGARLSPGLLRDLERDSHALCTLSLDLFTAELQRLVHRHTLAPTSEQQKAFALKAAEQLRLLGRPTSALEDSEKISEQSLIAAARVAVFLRQECR

SEQ ID NO: 1166 - DNA, 1149 bp, Thermobifida fusca
atgagcacaggccaagcagacaacgccaccacatggatagccttcgagccccatgacaccgtccacgtacgagacggtcgacagttcagttcccgagacagcaacacggccctggcagagaccgtcattccccgacccagcaccattgccggggcggccgccagcgcctacggcggcgacctgacggctgtgcgtggccccatcctcggtaagcagaaccctgacgggaggtggtgcccctactttcctgtcccctcagacatcgtggtggtggaaggcaaagaaaccacagcgcaggaaagggcctactaccggcttgtcaaaggatccgccgtagacgggaccgatctcgcccacgtccctggcgcccccgagtccttgctggagctccctccacaggtcacggccaaagcagagccgctccaaggctggatctccagcgaaggcctgtcgtcctacctcaacggcacgctgttccaggactccactgtggcatccgactacctggagaccatgctggccggcgaggaaccgctcgtgcccgaacaccggatcggcatcgctcttcaggaccggcggatacgctcgggatacctgtaccacgccacccacctgcgtcctcgcgatgggtgggttttcctcgccgaggtcgttccgcacccggaacggccgaaaccggagcacaccacagtgacgctggggggaatctcccggcttgccgaggtcgccgaactcccggccggctctgtggcgtggccgtcaaggcctgcttccttccccggcgggcgaatgctgctgtatgtggccacacccgcgttgtggcgcgacggctggcgtccacctcttccaccggaagccactctcgtagcagcggctgtaggcagtccactccccgtggccactgcatcacccaaacgagggttcttccgtacccgcaccctgcgctgggcggtcccacccggctcggtctacctcctgcacttccctgatgaggagaccgctgccgccgttgcatcctcctggcatggccgggcccttgccccttccgctgactggatccatacccacgaaggcgatcatccgccgactgatgcacccccgctccacactgctggattcggaatcgtcctcacaggagtctggacatga

SEQ ID NO: 1167 - protein, 382 aa, Thermobifida fusca
MSTGQADNATTWIAFEPHDTVHVRDGRQFSSRDSNTALAETVIPRPSTIAGAAASAYGGDLTAVRGPILGKQNPDGRWCPYFPVPSDIVVVEGKETTAQERAYYRLVKGSAVDGTDLAHVPGAPESLLELPPQVTAKAEPLQGWISSEGLSSYLNGTLFQDSTVASDYLETMLAGEEPLVPEHRIGIALQDRRIRSGYLYHATHLRPRDGWVFLAEVVPHPERPKPEHTTVTLGGISRLAEVAELPAGSVAWPSRPASFPGGRMLLYVATPALWRDGWRPPLPPEATLVAAAVGSPLPVATASPKRGFFRTRTLRWAVPPGSVYLLHFPDEETAAAVASSWHGRALAPSADWIHTHEGDHPPTDAPPLHTAGFGIVLTGVWT

SEQ ID NO: 1168 - DNA, 903 bp, Thermobifida fusca
atgaccgcttttctgctgtacctgtacgcggaatccccgctgcatgccggcgccgcagccagcgacggcgtcctcgacctgccgattcaacgagaaagcagcaccaactatccgctcatctgggggcagagcctcaagggtgcgctgcggcagaccgcccgcgacgctggctggagcgaagacaccttgaaggaggtgttcggatccgagccaggcgaaggagaagaaaccacccctggaaaactcgcagtgggcgatgctcaacttgttgcgcttccggtccccaccttgcgccgctcctttgcctgggtcacttcccggcttgctctcagccgtctggcccgcaaatacgccatcatcaacggcccccacgtcgtgcttcctgaagtccccaaccccgccgacggggagggctcctgcggtcgagggttctggggcggggaaacgccggaggtgctcggcccatgcctcgtcaagcttcacaatcctcgtggaggcggtgacgcccctgatcccgtcactgactgggcacggctcttggctgccgacgctattggcgacgccccccatttgcgccctttcgctagcaaactcgcagaagacctgctggttgtcggctccgagccgatgtctgttctcctgcgcgagtgcaccgagttcgcggtacgggtccaactccaccgtcaacagaagctggttcaaaacggtcccttcgtcagcgaatacctccctgccgaaacgattctcgcctccgtgctgaccctgcgtgggaaatacgctccggaagaagtccagcagctgcgggacctggtgaaccattccctcctccaagtgggcggagacgaaaccctcggcaaagggctggtgtggacccggatcgtcgaaggagaacgcaatggctga

SEQ ID NO: 1169 - protein, 300 aa, Thermobifida fusca
MTAFLLYLYAESPLHAGAAASDGVLDLPIQRESSTNYPLIWGQSLKGALRQTARDAGWSEDTLKEVFGSEPGEGEETTPGKLAVGDAQLVALPVPTLRRSFAWVTSRLALSRLARKYAIINGPHVVLPEVPNPADGEGSCGRGFWGGETPEVLGPCLVKLHNPRGGGDAPDPVTDWARLLAADAIGDAPHLRPFASKLAEDLLVVGSEPMSVLLRECTEFAVRVQLHRQQKLVQNGPFVSEYLPAETILASVLTLRGKYAPEEVQQLRDLVNHSLLQVGGDETLGKGLVWTRIVEGERNG

SEQ ID NO: 1170 - DNA, 480 bp, Thermobifida fusca
atggctgagcgagtagaccagcagatggccgcccaagcggagaaagtcatcgggcctttggtgaccgacccgcaactcgcccagcgcatccgtacccggatgcgccaattcccgatgcggctgcgctcttcaggtttggttgctgcgttcgcattcgctgaaagcaaaagcggaagcgccgaccccctcgagcaggcctatagccgactgtgcaaggccatcatcgagcacgctgctaaacgtaagcttctccctggcctcaccccccagtccaccccccgcgaattcctggacgtgctcaccaaagcggaccttcccacccacagtcgactcagcgccgaaatcgacctgctcgccggatggctcagccgaatcgcagaagcccgctacggcaaactggcggccgctgctacggagcacgccaaccaggaaaaccccggcgagtccgctgacagcgatacgggagaggagcgagaatga

SEQ ID NO: 1171 - protein, 159 aa, Thermobifida fusca
MAERVDQQMAAQAEKVIGPLVTDPQLAQRIRTRMRQFPMRLRSSGLVAAFAFAESKSGSADPLEQAYSRLCKAIIEHAAKRKLLPGLTPQSTPREFLDVLTKADLPTHSRLSAEIDLLAGWLSRIAEARYGKLAAAATEHANQENPGESADSDTGEERE

SEQ ID NO: 1172 - DNA, 1002 bp, Thermobifida fusca
atgacctttccccacggtcgacggggagctcaggacacctcctcgcaggaagaaccgaaagaaatcctgtgcgtctcctactctggggcgataggccgagtcctctgcggaagagtgacccagaagccagacagtgcgcaggatgcccaccattgcaagagcgcctcgccgaaatacgtcaaaaaaatccgctacgatcagcgctctacgctcgacgcttccgcgaattcgctgatcatcctgcgacgtttagctatcagcgacgtctctccccccaccgcggatgcgcgccgcgaggatcccgtgctcggctgggcaagcgagtactgcctcggctaccagaaggagtgggcacaggcagttgagcaacgccgcgcgcacgctctaagcattctcaacgcccgaaaacggcacatctaccgggtggaactgaccgcagactggcgcttcgtgaccggactaggagagcagaccggagaccacgaattcgggctcagcctgcacggcacctacggttggccgctcatccccgcttccacactcaaaggagccgcagcggcctgggcttctcggcaaaaggttccctctgaactctacacattggtcttcgggcccctgccctcccctgaagacgaggaggaccgagacaacccccggtgcggagtgcgtttctttgacgcccttcccctatccgatccccgtaaccaccgcaaaggtctgcgcgtccatagtgatgtgatcaccccgcaccagcacgcctaccacaccgatcagtccgcggaaccgtgcgcccccggggaacaccatcagcctgtgccgctgcctttcctctccctcagcggtactttcgtcactcacctcatcggggaggaccccgacctcaccgccaaggcagctgactggctcaagcaggcttgtgaagagtacggaatcggtgcacgcaccacggcaggctacggctacttcaccgtcaacatcaccgatcaatgggactccccgtga

SEQ ID NO: 1173 - protein, 333 aa, Thermobifida fusca
MTFPHGRRGAQDTSSQEEPKEILCVSYSGAIGRVLCGRVTQKPDSAQDAHHCKSASPKYVKKIRYDQRSTLDASANSLIILRRLAISDVSPPTADARREDPVLGWASEYCLGYQKEWAQAVEQRRAHALSILNARKRHIYRVELTADWRFVTGLGEQTGDHEFGLSLHGTYGWPLIPASTLKGAAAAWASRQKVPSELYTLVFGPLPSPEDEEDRDNPRCGVRFFDALPLSDPRNHRKGLRVHSDVITPHQHAYHTDQSAEPCAPGEHHQPVPLPFLSLSGTFVTHLIGEDPDLTAKAADWLKQACEEYGIGARTTAGYGYFTVNITDQWDSP

SEQ ID NO: 1174 - DNA, 1236 bp, Thermobifida fusca
atgtcttggatcaccctgcgcctacgtgtcaccaccccgctgttcaacggacatgacgacgaacctctccgagtcagttccctgcggggagccatgcgctactggttccgcgcactcgccggaaccaaggtcggccccagtattcggactctgcgtcgcctcgaagacgaagttttcggcagcaccaccaatccatccccggtacggatgcgactgggcaaactgccccaaacccgcaggaatccctgcctttcgttccttgactcgacacggtttcctgaccagctgcggaaagaacccgccatcggctatctgatggggcaaggcctcggcaccatcgtcaaaggcaggtaccagatcacccgcccctacgtattcccagaccacaaatacttcgaactcaagatggctctgtcggaggactctcgcatcaacgccctcaccctggcgtcactgtggatggtgtgcgcctacggtggggtggggtcccgtgtccggcgtggtttcggcaagatacgcatcattggagcgactctccacgaccaaaaatcggttactccctggacagagtcgtcacttcaaactccaggtctcactcattacaaggagctagacgatcggcaacgactgcagcccattggccctctcgatgactgcctggagcccatcgatgacctgctcaagcagataggcgcccctgatgaggctcgcccttggcgtgacgacgagatacctacctatccagtgttcagcagtaagtggacgtgcgccgggctcagcgcctattccgcttcttcatgggcagaactgctggcccacgtcgggcggcagtaccggctgtcacgggcgacagccgacaacagcgcttccaggaccaactactggcccaaagtcaaaaccccagaacgggacgctgtcctccacggaaactccaaccgcttccccctaggcgccctaggcttgcctgtggtctacagcaaagacaaagtgaccgtgggtgaacgccgtgcctcccccttgtggatgcatcccgttatggaggatggagaatggcggctgttctcattcgccttccacaacactttcctcccggcggagacagaagttcggctcagcggaaaaattcgcaagagtgtcatcatcacggacgatgatgttgtgaaccgcaccagtgactggattcagcgcatgcgacacgatccggccccctaccgtctccctggagaagaaggctaa

SEQ ID NO: 1175 - protein, 411 aa, Thermobifida fusca
MSWITLRLRVTTPLFNGHDDEPLRVSSLRGAMRYWFRALAGTKVGPSIRTLRRLEDEVFGSTTNPSPVRMRLGKLPQTRRNPCLSFLDSTRFPDQLRKEPAIGYLMGQGLGTIVKGRYQITRPYVFPDHKYFELKMALSEDSRINALTLASLWMVCAYGGVGSRVRRGFGKIRIIGATLHDQKSVTPWTESSLQTPGLTHYKELDDRQRLQPIGPLDDCLEPIDDLLKQIGAPDEARPWRDDEIPTYPVFSSKWTCAGLSAYSASSWAELLAHVGRQYRLSRATADNSASRTNYWPKVKTPERDAVLHGNSNRFPLGALGLPVVYSKDKVTVGERRASPLWMHPVMEDGEWRLFSFAFHNTFLPAETEVRLSGKIRKSVIITDDDVVNRTSDWIQRMRHDPAPYRLPGEEG

SEQ ID NO: 1176 - DNA, 24 bp, Thermofilum pendens
gttcaaaatcagcaagactaagag

SEQ ID NO: 1177 - DNA, 714 bp, Thermofilum pendens
ttgcagtacaacgacctcgacaggctcgacctcttcaccagggtgacgggggttctcgagaacctcacgccgctgagggtgggcgctggcagggaggctcagctcggctccccggtcgacttggagccgttgagggttaggctcggggataggagcgtcccctacatacccggtagtagcttgaagggtgtgttcaggagcctggcggaggctatagcgagggctgaggggcacgttatccacgacccgtgggacttcgaggcggccgagcaggaggcgcgggacgggaagtactgcctgatatgcggcatattcggtagcacgaggctggcgagccacgtgaggatctacgacgcctacccgaaggggactcccacgctgttcatgaagacgggcgtcgggattaacagggacttccggggggctcacccgaacatcctctacaccgagcgccaggtggagccggggcacaggtggagcttcatgatggacatcgtgaacataagggtgtacccggagcccggggacgagaggggcaggatcctgaggagggttctcgacatgctcgccgaggggatggtccaggtcggcgccaggaagactgtgggctacgggctcctcaggctagtggagggcgagtacgtcgtgtacggggttagggacggcaggctccagcgcctagagtccgggaagatagggggtggtgcggtttga

SEQ ID NO: 1178 - protein, 237 aa, Thermofilum pendens
MQYNDLDRLDLFTRVTGVLENLTPLRVGAGREAQLGSPVDLEPLRVRLGDRSVPYIPGSSLKGVFRSLAEAIARAEGHVIHDPWDFEAAEQEARDGKYCLICGIFGSTRLASHVRIYDAYPKGTPTLFMKTGVGINRDFRGAHPNILYTERQVEPGHRWSFMMDIVNIRVYPEPGDERGRILRRVLDMLAEGMVQVGARKTVGYGLLRLVEGEYVVYGVRDGRLQRLESGKIGGGAV

SEQ ID NO: 1179 - DNA, 924 bp, Thermofilum pendens
ttgagccaggtcccgtggtcctcgcacagggtcctcctcagggaggcagtcttcaggggctacctcgtcgccgagtctccgctgagggtgggcgctggcagggaggcgccgctgggctccccggtggacctctcggtcctcagggttaggcttggcggtaaaagcgtcccctacatacccggcagtagcctgaagggtgtgttcaggagcttctcccagtccctcgcagtggcgaaggggctaagcgtgtgcagcgggctgagcggggagacgtgcatggactacgaggacccgtcgctgggcggcgagaagttgctgagctacttgcaggggctgatgagggaggggcacagcctggaagccgtcaggctgttccacgagaaggcctgcctgatgtgcaaggtcttcggcgccccctcgttctccgggcacgtcgagttcagcgacgcctaccccgtcgacgagaaggggggcgtcgtcgacgtctccaccggggtgaggacgggcatagcgataaacaggaggacgggcgccgtctacgagagggccctctaccaggtcgagtacgtcgagccgggcgcgaggttcaggttcgaggctaggactacgaacctccccaactacgcgctcgggctcctctccgccgtcatcaggatgatgaacgagggctgggtcagggtgggcggcttcaagacgaggggcttcggagaggtgcgcgtggagggcctggagttcgcggctaggggcgcgactgtccgcggctcggtgctggtgaagctcgacgactacgactcggacgtcgacctctcgggcctcgccgaggccagggacgggtggctaagggcctccggggactccgcctggaaggcgctggctaagctcgaggaggtgtggtccaatgcaagcttcgggaagcgcggttag

SEQ ID NO: 1180 - protein, 307 aa, Thermofilum pendens
MSQVPWSSHRVLLREAVFRGYLVAESPLRVGAGREAPLGSPVDLSVLRVRLGGKSVPYIPGSSLKGVFRSFSQSLAVAKGLSVCSGLSGETCMDYEDPSLGGEKLLSYLQGLMREGHSLEAVRLFHEKACLMCKVFGAPSFSGHVEFSDAYPVDEKGGVVDVSTGVRTGIAINRRTGAVYERALYQVEYVEPGARFRFEARTTNLPNYALGLLSAVIRMMNEGWVRVGGFKTRGFGEVRVEGLEFAARGATVRGSVLVKLDDYDSDVDLSGLAEARDGWLRASGDSAWKALAKLEEVWSNASFGKRG

SEQ ID NO: 1181 - DNA, 999 bp, Thermofilum pendens
atgcaagcttcgggaagcgcggttagagtcgcgaggcgggcgccgaggagcaggagcgtgctcgaagggcttgcgggccgcctcgaggtagcgctggtcgcagacagctacctgcacgtgggctccggcgtccagcgcgtctccgtcccagtcgaggaggtcaggtcctccgcatccagggctaggacgaggagggagctcgaggacctcgtagcgaggctgtcggggaaaatcgagctcgactacgcccagccggtctacgccgggggcaggctggtggtgccgggtagcagcgtcaaggggaacgtgaggagcaggctcgagctcagcttcaagcccaagaacggcgtggcgaggtcctgcctcataagggcgaccgagggcccggtggccccgccgaagaagggggagcagggctggaggcacttcagggtctgggaggcctccctctcctaccccggcagggaggcctgcgagtacagcgaggactcgcccgaggtctgcctgctgtgcgacatcttcggcaccgccggcctacaggggctcgtctacttcggggacctggtcgccgcgcgcgccgagacggagcgcgtcgagctctacgcgggcgagaagctcttggcggtgaagcccggcggcaggttcgagggcgccgttaccttcaggaacctcaagccggcggagctggggctactgctctacggcatgggcttcagggacgggaggatgggcaggcaggtcctcctcggaaagcacaagtacagctcgcccggggagaggttcggcgtcgtacacttcgagctcgaagggctggccctcgccccgttctccgagaagcttgaggtgggcggagcgtcgctcgcgccgggctccagggcttcgggcgcggagctcgaccgcctagtctccgccctggtgggcgcggctaggtcggagttcggggacgagttgcttgacgtagacgaggtgggggcggttgagtctctcgctggagcttag

SEQ ID NO: 1182 - protein, 332 aa, Thermofilum pendens
MQASGSAVRVARRAPRSRSVLEGLAGRLEVALVADSYLHVGSGVQRVSVPVEEVRSSASRARTRRELEDLVARLSGKIELDYAQPVYAGGRLVVPGSSVKGNVRSRLELSFKPKNGVARSCLIRATEGPVAPPKKGEQGWRHFRVWEASLSYPGREACEYSEDSPEVCLLCDIFGTAGLQGLVYFGDLVAARAETERVELYAGEKLLAVKPGGRFEGAVTFRNLKPAELGLLLYGMGFRDGRMGRQVLLGKHKYSSPGERFGVVHFELEGLALAPFSEKLEVGGASLAPGSRASGAELDRLVSALVGAARSEFGDELLDVDEVGAVESLAGA

SEQ ID NO: 1183 - DNA, 2745 bp, Thermofilum pendens
ttgagtctctcgctggagcttagggagccgtaccccgtgtacagggcgttcagggtccccgtctgggggaggtgcggcccggtcagcgtgaggagggtcgagccgggcgacgtgaaggccctggagtggttcatcggggcggccaggaggctggcggagaggctcgccgcggaggcccgggacgactacgagaagctggaagtcgtcgcgaacgtcgccgccgtgctcctcaaggcccctctctcgcgggagctctcgcccgtgcacccgagccctatgaaagcccaggtggcgctcctagccctccccgacgccctcttcaagaggtacttcgggctggtgaagggcgacgtctactcgatgctccgcgacgtcctcgggctcgacctgggggccatggggctcggcgaggtcttcgggcgcgaggcctacgagaacgtgtacaggctgtgggtagcgttcccggctgacacgaggcccgggtacaacacgtcgagcctagccgcccacctgctcatgacctccgctctggcgtgggccctggcctacgagtccgggaagacggaggaggagaggcgcagggaggccgcggtcgccagggttgccgccctcctccacgacataggcaaggcggtggacccggagaggcacgccgaggagtctgccaggatagccgagtacctcctcaaggggatagtgggcgacgaggtcctcgccagggtggtgggggaggtcagggagcaccacgcccgcgagggctacgtgagcagggccgacaggctggcgtcggccgcggacaggctcgccaaggtcgtcgacagggctataggggacagggtctccaggatggaggggctggtgggcgggaggagggacgactggggcttctggaggaggctctacgagaggctcgacgacctcaagagggaggggctcgccagggaggaccccgtcaaggagctgactgagctcttcctggagagagcggaggaagccgccgagaatgtgaggaaggaggagaaggaggagggtgtgaagggcttaacgctactcctcttcgacgttggctccatacaggagttcgtctacaggagcatggagctcagggttgtagccgcggcgagcctcctagtggacttcgtgacgtactcctacctgccgctctacctgagggctaacggcgtgcgcgtaccgccggaggcattcctctactccgggggcggtatcctcctcatgttgctaccggagtcgctcgccgagagagtctgggagctcgcccggaaggtcaaagaggagttgccggagccgctgaggctggtggtagcggatgcggagttccacgtggacttcaagacagcctgggagaagatcgaggaggccctgctgatcgccaagctcggcgtagagctggcggacgagccgcagttcgacccgcagaacggcagggagctctgcaggctctgcctgagggagtgggcctcaacgagtgttcgcacgcccgaaggcgaggtacccgcgtgccagacatgcagcaggctctacgatctgggctccgaggtccacttccgcaagaagtgggagtcgagggtcgaggtgggaggccgctccttcaccccgagcgaggccttcgatgcggtgtggaatgatgtgtcgaagttcgtggtagaggttatcgcgggccacgacccgagggaggcggctaagcccaagcgcctcagggactgcgcggtgatcaagttcgacgggaacgcgatgggagcgttcatgtcgaaggccctgtccttcacggacgccatcgagaggagcttcagggtggacatggccttgaagaacgcctacctcaaggccctcgaagccctctacgagggggtcaggagggtcgcgggcgacggggcggcggaagccgaggtggcgagggtgttcctggggacgctgtacatgggaggggacgacggcgtcctgatagctcctgcgtgggcggcgcccctcctagcccacttcatagcggaggagttctcgaggcagctcgggctggtcgcgacgctcacggcctccgtcgccgcggggcccgccaggatgagcgtgtggtctctcgtcgactgcgcgtcggcggagatggaggaggcgaagctcgccgctacgaggcacaggtgcggcgcgttagtcttcgacgtgttcgactccggctcgccgtccggggcgacagccagggagaggctgaagaggtactcgcggaagcttggcgagaagtcgagggaccagctcatagacggctaccagccctacctcatcgagaggaaggctctcagcggggagggagtcccggaggcgtgggccaggctgttcagccacgtcctcggggttccggcgcggggcgcctggtgcgaggactcctcgttcaaagcccacgcggaggctttcgggaaagcttacctggcttcgagggcggagggcgaggacgaggaggtcgagagggctaggaagaggctggcggcgctgaggagggtcgccctggacacgtggagggaggtctcgggctccgcgtactggagggagcaggcgtacatatacgtgctcaggcagctggagtccgaggccctcggcgaggagacaagcgaggcgtacggcgcgctcaagcgcttcatcgagtcgaacctgttcgacgagtctgggaacgcgtcgggctacgtgcccctggtcgacctcctcacgttcataaagctggttaagggtggtgcgtggtga

SEQ ID NO: 1184 - protein, 914 aa, Thermofilum pendens
MSLSLELREPYPVYRAFRVPVWGRCGPVSVRRVEPGDVKALEWFIGAARRLAERLAAEARDDYEKLEVVANVAAVLLKAPLSRELSPVHPSPMKAQVALLALPDALFKRYFGLVKGDVYSMLRDVLGLDLGAMGLGEVFGREAYENVYRLWVAFPADTRPGYNTSSLAAHLLMTSALAWALAYESGKTEEERRREAAVARVAALLHDIGKAVDPERHAEESARIAEYLLKGIVGDEVLARVVGEVREHHAREGYVSRADRLASAADRLAKVVDRAIGDRVSRMEGLVGGRRDDWGFWRRLYERLDDLKREGLAREDPVKELTELFLERAEEAAENVRKEEKEEGVKGLTLLLFDVGSIQEFVYRSMELRVVAAASLLVDFVTYSYLPLYLRANGVRVPPEAFLYSGGGILLMLLPESLAERVWELARKVKEELPEPLRLVVADAEFHVDFKTAWEKIEEALLIAKLGVELADEPQFDPQNGRELCRLCLREWASTSVRTPEGEVPACQTCSRLYDLGSEVHFRKKWESRVEVGGRSFTPSEAFDAVWNDVSKFVVEVIAGHDPREAAKPKRLRDCAVIKFDGNAMGAFMSKALSFTDAIERSFRVDMALKNAYLKALEALYEGVRRVAGDGAAEAEVARVFLGTLYMGGDDGVLIAPAWAAPLLAHFIAEEFSRQLGLVATLTASVAAGPARMSVWSLVDCASAEMEEAKLAATRHRCGALVFDVFDSGSPSGATARERLKRYSRKLGEKSRDQLIDGYQPYLIERKALSGEGVPEAWARLFSHVLGVPARGAWCEDSSFKAHAEAFGKAYLASRAEGEDEEVERARKRLAALRRVALDTWREVSGSAYWREQAYIYVLRQLESEALGEETSEAYGALKRFIESNLFDESGNASGYVPLVDLLTFIKLVKGGAW

SEQ ID NO: 1185 - DNA, 24 bp, Thermofilum pendens
gttcaaaatcagcaagactaagag

SEQ ID NO: 1186 - DNA, 2937 bp, Thermofilum pendens
gtgaggggcgtgtactcgagcatcggggagctactggaggtgaagaccgccgccctgctgtacgagccgccgtggaaggccttcgcgcagctgaagaaggcgccgctactgccctgggcgaagcggggggcggggcactgggaggcggacgccctcgcggtggcggagaggctggggctcgcggaggtcctcgagaggaggctcggggaggtgaaggagctcgcccgcctggcgctcggcgccgagccgctcgtgctcgacggggcaggcgtgcagccgccggagaggctcgtgctcctgaacgtgttcgacccggacgtgtgcctcgacccgggcaacggctgcgacctcagggcgtacgcgcggacagtggagtccgccgccccggccttcgcggagagcctcgcgaacgctctctcaggcctgggggacgcggccctgaggtaccacgcgctctggttcctcctggagccgctctggttccgcgcgtgcggcgcgcccgtcgtatcgccggccgacccgaggttcccggtgtacacggtcttcgaccacgtctacgcggcggccacgctcgcgaacgccttcaggggcggctccttcaggggctacgtggtcgtcgtggactacgcgggggtccaggagtacatctccaaggccaggaaggccctcgacctctgggcctcctcgtgggtagcctcgctcgtcacgtgggccaccgtccagccgttcgtcgagctcctggggccagacgtcgtcgtgacgccctcgctgagggggaactggttctacgcggcgtggctcctcggaaggctcaggggcaccggggcctacggggcggccagggaggcggcgaggctcgcgtacggctactcgggcttcccgaggcacccgataatgcccacgcgcgctgtgctcttcctcccggaggttcccggggccctcgaggacgccctgcgcgacgaggcctcgcttaggggcttcatagagaggaaggcctccgaggcctggtccaaggcggtcggagccgtcctctccgaggggaggctgggcgcgctgctcggcgagaccctcagggcgaacggggtcgaggcagacgcctcggagctggaggagtacgtcgagagcgtcgcctcgacgctaccgctcccgcagaggctcatagtgttcaggcacggggagtcctacgctaggtacagggagtggctgggcagggtgttcggcggggagcccgcggcggaggcgggcggcgccagggtatcgctcgacgagcgggcgctctacttccactacctcatggacgagtacatcccgtcggaggaggccctgtggaagctgagcagggtggacccggacgtcgaggcccagtcgagccgatggtgcggcgcggcggccgaggtcttcggcaggctcggcttctgcagcgtgtgcggcgagaggccggccgtggtcggggcgccgtccagcaggtacggggggctcggccccgagtctaggagggtcgtgacggagggcgagaggctctgcccgaggtgcctcgcgaagaggctggtagccctcaaccccttcgccgcgctgagggccgtcggggtcccggcggcgaggacgttctggtccgtccccacgacgaacgagctcgcgaacgcggaggtagcggaggagcacctggacagggtcctcgacgtggtcgagaggcaccgggaggccgtggcgaaggtcctcgcgggcttccagtgggaccacgagtactactcgcggaggctcgcgcggagggcctacaggagggccggcagggaggtcgcgctcgtcgcgctcaggctgctcgcagccctcatcgaggcggcgacggagcaggagtacagggagaggttcgcgaaagccctggacgcgctcggggatggggaggcgcgcagggagatcgaggagctgttcaggtccatagccgggaagaggaggacgcggctcgccgtggtgaagggggacggggactacgcggggtccaggctgctccgggcgaggctgcggctcggcgcgggggagtacgcgggcagggtcgcggcgcaggccgggctcgggggcggggcggcggagctactcgcgagcgtagccgggaggctcggctcgaccgtcacgctctcacccctctacaccgcctcggcgtccaggtcgctcagccacggcgccgtcctagacgcacgcgcggtcgaggggctggggggcttcgtggtctacgcgggcggggacgacctgctcgcgctgacgcctgcgacggccggcgggaggtacgtggcgctggaagccgccctcaggacccgcaggggctactggggggagcgcgggagggggccgaggggcttccacgcgtcgcccggaatcccgctcgtctcgcccgcccccaggagctacggaaggtcgtacgcggtgctctcgatccactacagggacccgctcagcgcggccgtggcgaggtcgtccgagatgctcgaagaggcgaaggcttgcaccgcggtgtacgggcccgcaaccgtcgagagggacgccgtccggctagaggacctcaggtccggctcctccgcgatgctacccttcagggcggggcccggcgccgggctggccgggagccccgtttggaaggccgcgctactggcctccatggagctacgcggggaggtctcgtcgagcctcttctacgacttcttctcgtggcgcttcgacgagctcgtggagaggctcgccgccgagtcgaggacgcgcgaggcgtggctcgccctgcgctacctggtctccaggaacaccaggaggaaccccgacgaggtggcggggagggtgctgggcgaggagcttgtagcggctaggctcaggtcggcggacgggagggaggagagcctcgcaaccctggtgctccgggccgccaaggcgctcaagaggatggaggggtga

SEQ ID NO: 1187 - protein, 978 aa, Thermofilum pendens
MRGVYSSIGELLEVKTAALLYEPPWKAFAQLKKAPLLPWAKRGAGHWEADALAVAERLGLAEVLERRLGEVKELARLALGAEPLVLDGAGVQPPERLVLLNVFDPDVCLDPGNGCDLRAYARTVESAAPAFAESLANALSGLGDAALRYHALWFLLEPLWFRACGAPVVSPADPRFPVYTVFDHVYAAATLANAFRGGSFRGYVVVVDYAGVQEYISKARKALDLWASSWVASLVTWATVQPFVELLGPDVVVTPSLRGNWFYAAWLLGRLRGTGAYGAAREAARLAYGYSGFPRHPIMPTRAVLFLPEVPGALEDALRDEASLRGFIERKASEAWSKAVGAVLSEGRLGALLGETLRANGVEADASELEEYVESVASTLPLPQRLIVFRHGESYARYREWLGRVFGGEPAAEAGGARVSLDERALYFHYLMDEYIPSEEALWKLSRVDPDVEAQSSRWCGAAAEVFGRLGFCSVCGERPAVVGAPSSRYGGLGPESRRVVTEGERLCPRCLAKRLVALNPFAALRAVGVPAARTFWSVPTTNELANAEVAEEHLDRVLDVVERHREAVAKVLAGFQWDHEYYSRRLARRAYRRAGREVALVALRLLAALIEAATEQEYRERFAKALDALGDGEARREIEELFRSIAGKRRTRLAVVKGDGDYAGSRLLRARLRLGAGEYAGRVAAQAGLGGGAAELLASVAGRLGSTVTLSPLYTASASRSLSHGAVLDARAVEGLGGFVVYAGGDDLLALTPATAGGRYVALEAALRTRRGYWGERGRGPRGFHASPGIPLVSPAPRSYGRSYAVLSIHYRDPLSAAVARSSEMLEEAKACTAVYGPATVERDAVRLEDLRSGSSAMLPFRAGPGAGLAGSPVWKAALLASMELRGEVSSSLFYDFFSWRFDELVERLAAESRTREAWLALRYLVSRNTRRNPDEVAGRVLGEELVAARLRSADGREESLATLVLRAAKALKRMEG

SEQ ID NO: 1188 - DNA, 888 bp, Thermofilum pendens
gtggacctgctgggcctggtttacggatacgtcgacgagctcctgaagaacccggaggcggagaaggaggagctgaggaggaggctcatcgagagaatagtcgagaactactcgcggggacgcgaactggacgagaagctgaggctgtccagggagaggctcgagagcctagccgcggggctcgcgctggcgggcttccacgtcttcgtggttgacgcgaagctctccacgatgggagccgtcggggtgtcgcacggggttttgagaagcgtgttcgaggtgggggttagctgggaccacgtgctggacctgccgttcataccgggctccagcgtcaagggcgccgtgagggcggtcgcagagcgcgcctcgagggacgacgcggacgtcctgttcgggaggggcggggactcggggtgggccgggctactgctcttcttcgacgcctaccccgtcgaggccggggacaggctcctcgagccagacatcgtgacgccgcactacagcaggggcgggaggcccgtgaggttcgagtacgaggtcgagcccgtgcccgtggcgcacgtctcgatcgcgcctggggccgtcttcaggttcgtcgtcgcggtcgagccgggagggggcgtcctccacgaggaggtggaccgcgccctcgcgaacatctgcgggaggctcggcgtccagggcggggggccggcgtcgctcctgctaggcctcttggagtacgcgctcgccagcggcgttggggcgaggacgagccagggctacgggaggttcgaggtcgtctcgcgctccgcggtgatcaacgggtcggagcacaggacgcccctccgggtgaagcccgcgagggctaggaggggcaggtccactcgtcccggtgcggggtga

SEQ ID NO: 1189 - protein, 295 aa, Thermofilum pendens
MDLLGLVYGYVDELLKNPEAEKEELRRRLIERIVENYSRGRELDEKLRLSRERLESLAAGLALAGFHVFVVDAKLSTMGAVGVSHGVLRSVFEVGVSWDHVLDLPFIPGSSVKGAVRAVAERASRDDADVLFGRGGDSGWAGLLLFFDAYPVEAGDRLLEPDIVTPHYSRGGRPVRFEYEVEPVPVAHVSIAPGAVFRFVVAVEPGGGVLHEEVDRALANICGRLGVQGGGPASLLLGLLEYALASGVGARTSQGYGRFEVVSRSAVINGSEHRTPLRVKPARARRGRSTRPGAG

SEQ ID NO: 1190 - DNA, 1764 bp, Thermofilum pendens
ttggaggtggaggagctctcagccgtcggcgcgaggccggggtgcttcttctcggcggacttcgtgaacatcaccccgtggtacggcggcaggcacacccaggacgctgtgaggtgcctggacgagaggtgcacgaaagcctactactcgctccctacggccaggagcgtgaaggggctgctgaggtggcttaccagagcggtggtagcgagcttcgtccccgacgaccagctggccagccacggctacgccgcggtcgagtgcttcccgaactgcgggtccagcaagccgggcctcgtcgaggcgatcttcggaaccgtggagcacgcgaggcccggggggcaacgcgtagggtccagggcgggcgccctctcggtcgtcgtgaagccgaagctgaactgccgctcacccgtctacgccgagtaccaggacgtgctaaagctgatcaagagcatagccgggggtaaagggtggggcgtttactcgcagaagccgagcgcgctgctacaggagctcgaggaccggggcttcagggcgctgaggggggaggcgaggccggaggacaaggcggcggggttcgccgagctgttcacagtcccgcgcgtactgctgaacgcccagaggctcggcaagctgaggggcaaaaggcaggaggagttcgcgaggagcctcttcgaggtccagccgctcagggaggggtgcgtctccatgcgcgtcgagctctacctcgacggggacatgctctccggggccctggagcccgcgcggggggaggagctcgcggagagcgtgaagcggctcgaggagctcctactggtctacgggctactgctcttcggaatcgggaaggcttcgagcaggggcttcggcaggttcgcccccaagtcgccgaggggcaacgtgcacccgctggtcgagaaggccgccgcgcgcctcgaggagagagacctcgagggcttcagggaggagtgcctggggctggctgagcgggcgctgagggccctcggcgtcgaggcggaggcgaggaggacggtggcgagcgtcccgaggatctcgaacgccgaggtaacgctgatcgagaggccggcgcacccgtacccgtacgcatccagggaggccgcgagggttaagccctccaagaagccatgctcgggggacgtgctgtgcgtgctgagcgccgtaggcaaggccacgctgaagagcacgtggaaggcctactggcagtcgatctccggggctgaatggggcgtgacgggcccgggcttcccgttccacacgtgggggctgggcctgccgagagccgtgtgcaagggaaactcctgcacgggctacgtcgtcgtcgacgcggagagccttggaggcgcgcagggagacgtggactactgcttgcaacgcctcagctttaggaacgacctgaagaggtggaagtcgccgctcgtgctgtcccccgtccccgcgggcaacgggctcggggtagccgtcgtcctgctcaagcgcctagacatcaagccgttcctgagccccgaggcgcggagagccgtcctcgcccacgtcggtatacaccagggtagcagatacttgcacgtgatcgacgttgggaggggcgcgtcgacgaccggctggaccgaggactgcgggtcggaccccctcggcgccgccgacgtctctcagaggagggtcgtcgcgctccccggggacgcggcggagctcctcgtgaaagtccaggagctcgcgagggactgggttgtgtacctgctgaggtga

SEQ ID NO: 1191 - protein, 587 aa, Thermofilum pendens
MEVEELSAVGARPGCFFSADFVNITPWYGGRHTQDAVRCLDERCTKAYYSLPTARSVKGLLRWLTRAVVASFVPDDQLASHGYAAVECFPNCGSSKPGLVEAIFGTVEHARPGGQRVGSRAGALSVVVKPKLNCRSPVYAEYQDVLKLIKSIAGGKGWGVYSQKPSALLQELEDRGFRALRGEARPEDKAAGFAELFTVPRVLLNAQRLGKLRGKRQEEFARSLFEVQPLREGCVSMRVELYLDGDMLSGALEPARGEELAESVKRLEELLLVYGLLLFGIGKASSRGFGRFAPKSPRGNVHPLVEKAAARLEERDLEGFREECLGLAERALRALGVEAEARRTVASVPRISNAEVTLIERPAHPYPYASREAARVKPSKKPCSGDVLCVLSAVGKATLKSTWKAYWQSISGAEWGVTGPGFPFHTWGLGLPRAVCKGNSCTGYVVVDAESLGGAQGDVDYCLQRLSFRNDLKRWKSPLVLSPVPAGNGLGVAVVLLKRLDIKPFLSPEARRAVLAHVGIHQGSRYLHVIDVGRGASTTGWTEDCGSDPLGAADVSQRRVVALPGDAAELLVKVQELARDWVVYLLR

SEQ ID NO: 1192 - DNA, 498 bp, Thermofilum pendens
gtgagcgggttgccggagcccttcgaggaggccctgcgcgtgtgcacggcggtgcgcgacctctgcggcggcgccgaggggtgcggggagtcgttccagaggagggtggaggactttccggggctcgtctcggcggcggggctcgtgccggccctcgcgttctacctgtccaaggtcgaggactacggcgtgctcagagacttctactcgctcttctcctccgggagcctcccgagggacgcgcgcagggagaagatgctcgaggacctgagggaggaggggctgggctacgcctcggccctcgccgcgatcctcgcctacgcggctaggcaggcgcccgccgggtgctccctgaagctggacggcgacgccgcgcggggagtcgccgaattcctagactgcatacgcaggggcggcggggagctcgtagtcctcgcaaccctggaaccattcgtggtcgagctcggcaagctcgccagggcgcttctcgggaggtga

SEQ ID NO: 1193 - protein, 165 aa, Thermofilum pendens
MSGLPEPFEEALRVCTAVRDLCGGAEGCGESFQRRVEDFPGLVSAAGLVPALAFYLSKVEDYGVLRDFYSLFSSGSLPRDARREKMLEDLREEGLGYASALAAILAYAARQAPAGCSLKLDGDAARGVAEFLDCIRRGGGELVVLATLEPFVVELGKLARALLGR

SEQ ID NO: 1194 - DNA, 1011 bp, Thermofilum pendens
gtggtttttcggttttttagctgtatgggggtgttcgttgtatctgactacgagtacggctaccttttgctcgcctccgcgtatactcccgtgcacgccggtagtgggcgtggctacggcttcgtggacttgcctgttcagagggactcgctcggctacccggaggtgtggggctccagtgttaagggcgcgttgaagggtttcctgttgaggtccgtgggcgtcgaggctaaggggtttttcggctccgagcccgaggagtctccgaccgtgccgggcttggcagtcgtcacgggtttgtcgttgctggctgtccccgtgccgagcgtgcggaggggcatcgtgtacgtgactaccccctacctggcgtccagggtcgccgggtacgtcgacgtcgtgaagaggctgcgcggcttcgagggggtggagtcgctggccttcccgctggaggccttcgagaaagccctggtggaggtcgtggaggcggggtctagcctgggcgagggtgaggcggcggcgtcgaagggggttgcggttgacggcgccgtgtacgtctcggggagccgcgtcagggtgtcccgggagctggagttccccggggggctcgacgacgcgcttcgctctctgaacgtgctgtactcctacaagaaggtgttcgggaacctcgtcgtcctcccggacggggtcggccggagcgtggtgaacggggcgctccaggttgtctacaggaacaggctcagcgacgccacgaagaccgtggagaggggggcgctgtggagcgaggagtacctcccgtacggctccctgctcgtaggcgcggtcatggtgaaggacttcgagaagctgagggggctcctggaggccgggcggtacgaggcccagctcaggctctacgagtccgcgtggggcaagctgaggagcattctgggcgcgatgaacgggtacctggtcgtcgggggcaaggagaccgtcggcaagggggtcttgagggtcgcgatcgcgagggggtga

SEQ ID NO: 1195 - protein, 336 aa, Thermofilum pendens
MVFRFFSCMGVFVVSDYEYGYLLLASAYTPVHAGSGRGYGFVDLPVQRDSLGYPEVWGSSVKGALKGFLLRSVGVEAKGFFGSEPEESPTVPGLAVVTGLSLLAVPVPSVRRGIVYVTTPYLASRVAGYVDVVKRLRGFEGVESLAFPLEAFEKALVEVVEAGSSLGEGEAAASKGVAVDGAVYVSGSRVRVSRELEFPGGLDDALRSLNVLYSYKKVFGNLVVLPDGVGRSVVNGALQVVYRNRLSDATKTVERGALWSEEYLPYGSLLVGAVMVKDFEKLRGLLEAGRYEAQLRLYESAWGKLRSILGAMNGYLVVGGKETVGKGVLRVAIARG

SEQ ID NO: 1196 - DNA, 984 bp, Thermofilum pendens
atgaggttgctcgtgctacgcggcgtagacgaggtgaccgtgagtagcaggagcacggtggtgatcaagtccgggaacagggtgttcgagcgggctctcagggacgtcgacgcagtcctcgtcgtgggctctgggatcaagatatcgtcctccctcccgcccgtgttggcgctccacggcatacctctctcgatactcgcgaaggggcacgtcgctgtgctactgaaccctgtcgggacgaagtataacaactacagggccctccagtacacgttgccgaagaacaaggcgctcgcaatcgcgctcgaatacctcaagtccagggtgcgcggaatggcgagcataatcaggaaccgcgggggaaggctccccgcgctccccgagcctcccgacccagcgctctacgaagacccggcgaggctcgaatcggacataagatcctgggaggccgccgcctcgaacaccctctgggacgaggtcttcaagctactggacccatccgcggccagggagctcagagagagatacggcttcgcggggaggaagcccgggcacccggaccccctcaacaaggctatctccgccatgtacgcagtcctctacacgctctcgacgaaagcactcgtagccgccgggctagaccccacctacggcttcctgcacagaacccagtacagcgtgccgctagcgttcgactacgccgaagccttcaagcccttagcagtggaagccgcgctggacctcgtaaacgaggaaggcctcccaacgctgagcgaagacggcgacctcgacaaagactccctcaacaaggccatgaagaggctctacaggtacctctcagccaagcacagggaaaccgggaaaacaccctaccagcagatacacctgaaggcattctgcctcgcaaaacacctggaaggcaagtgtagcagagaaaaactcgccttcacgtgggacaaaaagcgctacataatacacgagtaa

SEQ ID NO: 1197 - protein, 327 aa, Thermofilum pendens
MRLLVLRGVDEVTVSSRSTVVIKSGNRVFERALRDVDAVLVVGSGIKISSSLPPVLALHGIPLSILAKGHVAVLLNPVGTKYNNYRALQYTLPKNKALAIALEYLKSRVRGMASIIRNRGGRLPALPEPPDPALYEDPARLESDIRSWEAAASNTLWDEVFKLLDPSAARELRERYGFAGRKPGHPDPLNKAISAMYAVLYTLSTKALVAAGLDPTYGFLHRTQYSVPLAFDYAEAFKPLAVEAALDLVNEEGLPTLSEDGDLDKDSLNKAMKRLYRYLSAKHRETGKTPYQQIHLKAFCLAKHLEGKCSREKLAFTWDKKRYIIHE

SEQ ID NO: 1198 - DNA, 282 bp, Thermofilum pendens
gtgatagtgatcgtcgcctatgacatctccgacgaagacaggagaggcagactgcgcagatatcttaggaggctgggcctcgcaagagttaacagaagcgtctacgctgggcctggaacagctactacagcagagctcgtggcagagcgagctaaagaaatcgttgaagaaggcgattcggtgttcgtcatcgttgttagagaagatgaataccagagggcacacgtatttgacggcagagattactacatcgtgtcggagcgaaaatacgaagtatactag

SEQ ID NO: 1199 - protein, 93 aa, Thermofilum pendens
MIVIVAYDISDEDRRGRLRRYLRRLGLARVNRSVYAGPGTATTAELVAERAKEIVEEGDSVFVIVVREDEYQRAHVFDGRDYYIVSERKYEVY

SEQ ID NO: 1200 - DNA, 2106 bp, Thermofilum pendens
atgtccgtggaagagctggtgatacgggtagaccccgtctacaccccctacagcaagccggagagactcctcggatcctacaagctcacggaattccaagtcgaggtatccagggagcttggaaagcgctcagacgtcctgctcgtcgctccgacgggttccgggaagaccctcacgctcctgctctcgccgggcctcgatggagaggatttcccgggcttcgtggcgctctacccgaacaacgttctactgcaaaaccagatggagaccgttgcctcggcgctctcggaggctctgggcgctagacccttggagggctttggcggagactcctctctcctagtgtacgaggtgcccgctgaggtgggttgcgacttggacgccgcggtgtgcggctcgaggtacgttgccctgcaagcactttccgggaggtttatcgtaggggaccccacgaagagggacttcgtctacaagcaggcggagatgctttacaagctcagcaggaagggcgggctttaccacgtcgttttcgcgacgccggatacgtaccttctcatctacacgggcgcctacagagacttcgaagacgtcggtaaaacagtccacaacctgcttgtgagtctggcggcgggcaaagacgagcgtgcactcgaggacgctttgaggagtacgaagaccgctacgcgcttcgagctgagcaagatacagggcgtgaaggagagagtgctcgtgcaccccgtattcgtggacgagttccacctctacggcccatacgaggtcgacgcactacacgcggtgatctcgatgttcaaaagcgatacaaacctaccggtcgtcttctcctcggcgacgcccgcagacgacatactagaggaactccaggacgccggcgtcaggccgagccgcgttgaagctagggtctccaagggagaagggttcggcgttaagggacccatggagctggtcttgcacccggtcgaaacggagaagaagggtataggtgcgtactacgaggcctctgaggctgtccaagagatagtcttggagaatctgcggagggatctcgaaggcttcggtggggggaaagccttggtaatactcgagaggctctacgccgtcgccgagctagccgtcaggcttaagggtgaaggcataccgtgcaggtgcatcgcgagcgacatcgtcacgaggaacctcgtcggtgcctgcgttgaggaagcacaggtaatagtcggtagcgaggcgacatcccagggagtcaacctaggccccgtgaagctagggtacatggggggcgtcgcggccgaggacgttgtacagaggctaggcagggttgggcggcgcggcgtcccgtcgagggtgcgcctcgcagttcccgcaaaagtactcgaaaagcacagccccccggactccacggactacgcggggctggtaaagtgggtcggcgaggcgtttacgaactacgcgaggaggaagcgcgacgtagtgcattttctcagcgagaagataaggaggttcaggaggaacatcatacgtgccgtcggggcagtctcactggcaagggtgtccggtaacaccagcgccttgaggaacctcgggataagtggctcggaggccgcggagatgcttgaaacgttcgtgggacccccggagcaactgtctaggctggtgatgttcaggaagagcgggttcagcgtgaggtacacggtggagggtggctccggggaaggcgaagactccatagggcttataacgagaaacttcgagatcgtcggctccgagagaggagttcttaagatccggctaaagcgcgcaagggggagcctagttatagagagtagcggtaacctgagggggctcagccagaagatcgtggatctcgcggatttcctcaggcttacccgcgggaggctcatagtggagatgggtgacggcgaggtagagctggcccgctggaaggaggggggcgtgcttcgacgcggagacgcaatggtctacgttcttgagcagggacccgagatctccgagtacatagcgtacacgggcgaaggtgcatctgtgcgcaatccacagactgggcgtagctacgcggttatctttatctaa

SEQ ID NO: 1201 - protein, 701 aa, Thermofilum pendens
MSVEELVIRVDPVYTPYSKPERLLGSYKLTEFQVEVSRELGKRSDVLLVAPTGSGKTLTLLLSPGLDGEDFPGFVALYPNNVLLQNQMETVASALSEALGARPLEGFGGDSSLLVYEVPAEVGCDLDAAVCGSRYVALQALSGRFIVGDPTKRDFVYKQAEMLYKLSRKGGLYHVVFATPDTYLLIYTGAYRDFEDVGKTVHNLLVSLAAGKDERALEDALRSTKTATRFELSKIQGVKERVLVHPVFVDEFHLYGPYEVDALHAVISMFKSDTNLPVVFSSATPADDILEELQDAGVRPSRVEARVSKGEGFGVKGPMELVLHPVETEKKGIGAYYEASEAVQEIVLENLRRDLEGFGGGKALVILERLYAVAELAVRLKGEGIPCRCIASDIVTRNLVGACVEEAQVIVGSEATSQGVNLGPVKLGYMGGVAAEDVVQRLGRVGRRGVPSRVRLAVPAKVLEKHSPPDSTDYAGLVKWVGEAFTNYARRKRDVVHFLSEKIRRFRRNIIRAVGAVSLARVSGNTSALRNLGISGSEAAEMLETFVGPPEQLSRLVMFRKSGFSVRYTVEGGSGEGEDSIGLITRNFEIVGSERGVLKIRLKRARGSLVIESSGNLRGLSQKIVDLADFLRLTRGRLIVEMGDGEVELARWKEGGVLRRGDAMVYVLEQGPEISEYIAYTGEGASVRNPQTGRSYAVIFI

SEQ ID NO: 1202 - DNA, 681 bp, Thermofilum pendens
atggtgtttttctaccgcgcggagctcaggctaaaaggctttctctggtaccatacgctggcgagggctactgagagcttttacacgcacagcgtggtacctgtggtgcacaactacgggttaacgctcgccttagcgggctatgacgctgacccagcattcggctacgtctcgatatacgggaggaagggctacaggtctctgctggagctgttcagggagcacggtgtctacgcctaccccgctatcgccaagagggcttacacgcaggaggttatcatgtcggcgataggggaaagcaccgtgcaggcgaaggggaaggggaggctgtcctacccagacttcacgaagaacgttgtcctcgcgccgggcagcatacttgaaaccttgatagtatcggagggcgagctaccgtctaggttcgccgtcaggattggcgctaagagggcgggtaccctctgggtggagttgacccgggttcccgtcgacatagctaacaacaggaaagttacacacccgttcaacgttaacgatgttgtaagggttgacggttacacggttctgttgcgtcacgaagcgggagacgtgggtatatttggggtcgcagaggaagcctacgtggtgccggtgagggattcaaagactaaagaggttgtcgtccctgctttgaagctcgagtga

SEQ ID NO: 1203 - protein, 226 aa, Thermofilum pendens
MVFFYRAELRLKGFLWYHTLARATESFYTHSVVPVVHNYGLTLALAGYDADPAFGYVSIYGRKGYRSLLELFREHGVYAYPAIAKRAYTQEVIMSAIGESTVQAKGKGRLSYPDFTKNVVLAPGSILETLIVSEGELPSRFAVRIGAKRAGTLWVELTRVPVDIANNRKVTHPFNVNDVVRVDGYTVLLRHEAGDVGIFGVAEEAYVVPVRDSKTKEVVVPALKLE

SEQ ID NO: 1204 - DNA, 1125 bp, Thermofilum pendens
atgagtggtgaaaagagggacgtgttggcggagctggggctgggcgaccttagaccctaccttaggagcatcggggataaggacaggatctttccaaaggctcacaggatagaagtagtcttcctcgtgagggccgcgaactacctgttgcttagaacggagggcgccggcacgataaacatgacgaccttggagtacagcggaggcgcgatggaagttcccgtcatacagccccagaagctcatggcggttacgaggaggcagatgctccagttgctgagagagtacagggactctctcgacgaagtctcgaagaggtggctcgttcaggaggtaatcgggaaggctaaggatctcggtttcaagaaggttagcgaggagtggaactgcacgattcagcctccgctcgcggagttcggggaaaaggctaccgacataggcatggacgggttctgtcctcactgtacgattttcggagccgcgctcaccgaacagcacaacgagaagttcggtgggcttagcatcggtataaagacgagggttaggttcgacccggcgtttgcaactcagaggagaattaccccggagactcacaacaaggtcacggagggccacctctctatgaccgggcaggcactcttcagcgaagtgcacgtggagcccggaaccgtgttcatcggtagagccgagctcgtagacctgacagagcccgagctggtagccacgctgtactcgctggcaactctccgcgagctcggaggaagatccggcatttacggaacggtcagggtcgagatactgggggtaaaggctggaaagtacgcttcgacgacagcgtacgacttggctgccgagaacgccgggaaagggtatgaagaagtcaagaagaacttgaaggaaaggctggagaagctcggcttcacgcccgtagataattccaagttgctggcagccgtcgaccacaaggatcccaacggtctcttcaaggatctgtggaggagcagtatagacttcgccgagaagatggttaagtgggtggaggagctaaagggcggaggtcagaaagggtcgggtaagaagtcaaggtcgaagaaagccgagcccgaggagtctgaggaggagtag

SEQ ID NO: 1205 - protein, 374 aa, Thermofilum pendens
MSGEKRDVLAELGLGDLRPYLRSIGDKDRIFPKAHRIEVVFLVRAANYLLLRTEGAGTINMTTLEYSGGAMEVPVIQPQKLMAVTRRQMLQLLREYRDSLDEVSKRWLVQEVIGKAKDLGFKKVSEEWNCTIQPPLAEFGEKATDIGMDGFCPHCTIFGAALTEQHNEKFGGLSIGIKTRVRFDPAFATQRRITPETHNKVTEGHLSMTGQALFSEVHVEPGTVFIGRAELVDLTEPELVATLYSLATLRELGGRSGIYGTVRVEILGVKAGKYASTTAYDLAAENAGKGYEEVKKNLKERLEKLGFTPVDNSKLLAAVDHKDPNGLFKDLWRSSIDFAEKMVKWVEELKGGGQKGSGKKSRSKKAEPEESEEE

SEQ ID NO: 1206 - DNA, 25 bp, Thermoproteus neutrophilus
ccagaaatcaaaagatagtagaaac

SEQ ID NO: 1207 - DNA, 2697 bp, Thermoproteus neutrophilus
atggacttttcaaaaaaggcggctctcctgctgtcgagccccccgcactgggaggaggacggccaggtaagagagctcgtcgagagggtgcgcagggccctgggggccgacgccggcggggacctcgtcgagaggattagggagtacgtgtggggcggcatgccgagaggcggcgctccatacggctacatacacaacgtcttctcccccacgctgaagagggagctgaggaagccgccggcggaggaggtcagggcgtactggagggatctcgccgaggttgtcgagggcgccggcggtaaataccacgtcttctacgccgcctacgaggcgctttggatcaagagggggctgtcggcaagggtggccaaccccctggcgcccttctacgacgccttcgacgaggcctacgccatggccacgctcgccaactggttttccgacggcggagagccctcggggtacttcgtaaacgccgacgtgccgggggtccaggacttcgtgggggccgggaggaaggccggcgacttctgggccggcagctgggccctctccattgccgtctggctgaccgcctggcctttcgtcgagaagtacggccccgacgtactgctgaggccaaccgcgaggctcaacccgtactacttctacttcatccgcgggagctcccagaagctcgacaagcatctcagagacgtcatgcgcgaggtcggcttcacgcccccagagccggcgtggataatgcagcccctcatcggcgagaagatccagctagtgctcccccgcaggtggagtagcgaggaggaggtggtgagggaggtcgtggaggggtttaaaaaggcgctggactgcctcaccggcctcgcgagggggcacgtctgcgacctgctgaggggccacatagacgtaattccgagcggcggctgctttgacgccctgtataggcttggggactacgcagaggtgaggctcccgcttagggtcacagtcattgacataggggagtactaccgggagcttagggataagtactgcgccggcgccgaccactgccccgttctaaaaatcgcctttttcgacgagctactacggaactcgcacgcagccgtaggctttcagatgtctctagagaggcagcggaggagggtgcccacggccgggccctacttccaccccgccgccttcgacgaggtgaagccggccttcaagacgccggggcccgccgcctctacacacgtgtttttcaacgagaagacgtggcgcgtctgtacagtctgcggctccgagccggcggtcgttgggcttaggaaggtgagaacccccacggggaaggaggactacaacccagacgatctagaggcctttataaacgcgctgggggccaactgcgaagacttcgagaggcatctaaggagggtcatacgccccggggagttcctggggcccaggtgcctcgccaaaaggctgatatacctcagggcgaagccctccaagcaaccaggcgaggagccgttgcctgaggagaagctccagaggtttgaaagcacggaggacgtggccgtggctgtggtggccaaggtgggagaggcgttggagagggaggcccagaagattaaagacgggaggagtggggcgtgtctcaaggtcgcggactatctaacgaagggcggggggcgcgacctggagatggtgtggggaaccgccgaggacatgaagagggagtgggaggagtgtatcaaggcccttgaaaaggcggaggtggacctcggcgggttggcggcgggggccggactcgcggggtggccgcacagcgccgcgctggggcccaggctcttctacgcagtcgtcaggggagacggcgacagcatgggcgagctcctcgacgggaggctgccggctaggtggtatgaagaatacgagagggcgctcggcggggggctggccggcgtggaggagtacttcaaggccgtgaagagctaccttaagcgccacgtgggggaggatgcggagcagacagtgcccataactcccctctaccgcgtcgccataaacagatcgctggttgtgacgtcgcttagagactgggcggccgtggagggggcctccggaatgttgatatacgcaggaggcgacgacgtggtggccctcgcgcctgtggaaaaggcgctggacgtggtggcgcagaccaggcagaacttctgggggggcggcttccacagcgtcggcggctaccacataccacagctggcggcctacgggaggagctacgccgtgaggttcgtacatgtgatggacataatgtccatcgagctgaggaaatcccacgaggacctagaacgcgcaaaagacgccgcgtgggagaggcacaggaaggactccgtagccgtggcctcctcgaggacccagcacgccgccgtcctcccccttagagacgtctccacagtggacagactgaagctcgcgtggctctacatgctcaaagacgccatcagcaaaaacgccccccacgacgccgagaggaggcttaacggggacctcgacgcagacgccacctacagagtggccgagcacgtcctcaggaggaacgccaaagacggcggagccgccgcgcagatagcctcatggctccgcggggcgtccccgaggtatataagggagttcttcggcgcactcgccgtgttgaagggggtgctatga

SEQ ID NO: 1208 - protein, 898 aa, Thermoproteus neutrophilus
MDFSKKAALLLSSPPHWEEDGQVRELVERVRRALGADAGGDLVERIREYVWGGMPRGGAPYGYIHNVFSPTLKRELRKPPAEEVRAYWRDLAEVVEGAGGKYHVFYAAYEALWIKRGLSARVANPLAPFYDAFDEAYAMATLANWFSDGGEPSGYFVNADVPGVQDFVGAGRKAGDFWAGSWALSIAVWLTAWPFVEKYGPDVLLRPTARLNPYYFYFIRGSSQKLDKHLRDVMREVGFTPPEPAWIMQPLIGEKIQLVLPRRWSSEEEVVREVVEGFKKALDCLTGLARGHVCDLLRGHIDVIPSGGCFDALYRLGDYAEVRLPLRVTVIDIGEYYRELRDKYCAGADHCPVLKIAFFDELLRNSHAAVGFQMSLERQRRRVPTAGPYFHPAAFDEVKPAFKTPGPAASTHVFFNEKTWRVCTVCGSEPAVVGLRKVRTPTGKEDYNPDDLEAFINALGANCEDFERHLRRVIRPGEFLGPRCLAKRLIYLRAKPSKQPGEEPLPEEKLQRFESTEDVAVAVVAKVGEALEREAQKIKDGRSGACLKVADYLTKGGGRDLEMVWGTAEDMKREWEECIKALEKAEVDLGGLAAGAGLAGWPHSAALGPRLFYAVVRGDGDSMGELLDGRLPARWYEEYERALGGGLAGVEEYFKAVKSYLKRHVGEDAEQTVPITPLYRVAINRSLVVTSLRDWAAVEGASGMLIYAGGDDVVALAPVEKALDVVAQTRQNFWGGGFHSVGGYHIPQLAAYGRSYAVRFVHVMDIMSIELRKSHEDLERAKDAAWERHRKDSVAVASSRTQHAAVLPLRDVSTVDRLKLAWLYMLKDAISKNAPHDAERRLNGDLDADATYRVAEHVLRRNAKDGGAAAQIASWLRGASPRYIREFFGALAVLKGVL

SEQ ID NO: 1209 - DNA, 891 bp, Thermoproteus neutrophilus
gtgggcggggtcttgcttctacaggcggtaacccctctacacgcgggggtgggcaggtccgaggccgctcacgtcgatctgctggtgcagagggacgagttcggcctgccggcgatatgggcgtcgtctctcaaaggcgcgttgaagagccacgccaagatgaagaaggacccccttgtccactgcgtctttggcagagacgcggttgggcaggctcccgaggggatctccggcgtaactctattcgacgcgaggctcctcctcatccccgcgaggagcctaaggggcgtgtggatctacgtaacaacgccgcatatgctccgcgcctttatcgtctacctggagtctcttgtccccctcggcgtagagggcgcgaagacgctcctcgacgtggctaagaaggcgcttgacatatctagagacgcgcctgtcgtctcttcgcagagctacctctgggacggctccctcgtcataaacgagctggctataaaacaggcgaaggtaaacggcgacttggccaagttcacagagcagctggcgaaacacctctcgctccccaagacggacctcgccgttgtgggcgacgacatagccaagacgctcgtcgaccgctccatgttgatacagtacagagtgaggctcaccgagcggaagactgtggcagagggcgccctctggagcgaggagtatctgccccagttctcagtcctccactccgcagtcgtgtgcagagcggcaaagtgcagagagggaaacgaagaaaggcagctcaaggcggaggaggtgtgtgtaaagttcagagagcttgcggcgggcggcgggaggggctacgtctgggtcggcggcaaggagacaatcggcagggggctggtggaggtggcgctggtatga

SEQ ID NO: 1210 - protein, 296 aa, Thermoproteus neutrophilus
MGGVLLLQAVTPLHAGVGRSEAAHVDLLVQRDEFGLPAIWASSLKGALKSHAKMKKDPLVHCVFGRDAVGQAPEGISGVTLFDARLLLIPARSLRGVWIYVTTPHMLRAFIVYLESLVPLGVEGAKTLLDVAKKALDISRDAPVVSSQSYLWDGSLVINELAIKQAKVNGDLAKFTEQLAKHLSLPKTDLAVVGDDIAKTLVDRSMLIQYRVRLTERKTVAEGALWSEEYLPQFSVLHSAVVCRAAKCREGNEERQLKAEEVCVKFRELAAGGGRGYVWVGGKETIGRGLVEVALV

SEQ ID NO: 1211 - DNA, 426 bp, Thermoproteus neutrophilus
atgagcgaggaggtaaagctggcggtggagtgcaccaaggccgtggagggctatagagacgacgacgccaagaggcggtacgcccagaggactaggcactttctctcagacataacgacgcttggggtggcacacgttgtggccatcgcgtcggcgagggccggcaaagacgccgtcgagaccgggctgagggctcagacgtgtagagaggccgtcgagaggatatcgcagatgaagctcacagtcgaggaggcctcctacggcctctacggcgctgtgttgctctacggcctcaaggccctgggcgtcgtcaaagccgcctccctcgcagacgcgcttctggagctggacagccccatggcgtcctccgcggcgtatcaatacgccctgtggcttaagactctggcggaggcctacttcaaataa

SEQ ID NO: 1212 - protein, 141 aa, Thermoproteus neutrophilus
MSEEVKLAVECTKAVEGYRDDDAKRRYAQRTRHFLSDITTLGVAHVVAIASARAGKDAVETGLRAQTCREAVERISQMKLTVEEASYGLYGAVLLYGLKALGVVKAASLADALLELDSPMASSAAYQYALWLKTLAEAYFK

SEQ ID NO: 1213 - DNA, 1170 bp, Thermoproteus neutrophilus
atggaggccgccttcagagtcagagtctcgacgccgctgtccgtcggctggtacgacccaacgctcgtcgacccggagaaccccctcaggcccgcctcgctcaagggggtctggcgctggtgggcgagggccttcgtaggaggggtcctctacgagagggggtgtctaaggggggagcccggccgcgtggaggtgctccggccgagcaggagggaggccgaggcggtgtcgagggcggtcggcattacgctgggcctcggctacgccgggagcagagaggcggcctcgtcgaagtttagaattaccacacgcgtcgtgagggggccccgggtggagagggccagaggcggccccatctacctcggcgggaggcccgtggagctccagaggttcaagctcctcacgctggggaagccccccaagaccgtcgagtacgtctcagacggcgagttcgagatcaagatatctgccgagggcatcccgcgggaggtcttcacagccgccgtgggcatattagccgtggccctcacgctggggggcgtggggaaggggtcgcggaagggcctcggctctcttgacgtggtctacgccagcgagccccggcacgtcaaactcgccgagctggtcagagacgtgaagagggcagtggagaggctggtcagagacgactgcggggggaagcccaggggcctccccccgatgcccgtcgtggcggacgcggcggtggagggcgtgaaggtggcgcagatatatgcggtgcagaaggcccagttcccagacctccacaacttcttcctaaggccccagaggacgcgggtcctccacggcgactaccgggcggaggacgacctcaggaagaccctgtctgcctgggcactgggcctcccccgttcgcagaggggcaccggctacgaaagcgacgtggagaggagggcctccaccataatgctctcgtaccacggcagtgggcacatctacggcgacggggctttcctcacggcgctcatctcgggcgactggcccaggaggataacctggagctccgaatacgcagaggaggaggttgaggtagacgagaagaagatcatagaagcgcacgccgcagccctagccgagttccaggagtacgtcaaaaagataggcggcgaagtcgcgaaggtatggccgtga

SEQ ID NO: 1214 - protein, 389 aa, Thermoproteus neutrophilus
MEAAFRVRVSTPLSVGWYDPTLVDPENPLRPASLKGVWRWWARAFVGGVLYERGCLRGEPGRVEVLRPSRREAEAVSRAVGITLGLGYAGSREAASSKFRITTRVVRGPRVERARGGPIYLGGRPVELQRFKLLTLGKPPKTVEYVSDGEFEIKISAEGIPREVFTAAVGILAVALTLGGVGKGSRKGLGSLDVVYASEPRHVKLAELVRDVKRAVERLVRDDCGGKPRGLPPMPVVADAAVEGVKVAQIYAVQKAQFPDLHNFFLRPQRTRVLHGDYRAEDDLRKTLSAWALGLPRSQRGTGYESDVERRASTIMLSYHGSGHIYGDGAFLTALISGDWPRRITWSSEYAEEEVEVDEKKIIEAHAAALAEFQEYVKKIGGEVAKVWP

SEQ ID NO: 1215 - DNA, 789 bp, Thermoproteus neutrophilus
gtgaagaggccgaagaagagggaggaaagggaggtagactacggcaagtacttctcaagctgcgcaggcgactacaacgtggtgtcctgcgtcaacctggcgtttctagaggcttctagagacctggcgaggcagaacatcaggctcaggatccccgagttctcgcggtgggccgtcttaacgctccaccagaggccgccgcagatgtgggaccaggtcaagcgctacctcgagctggtctacgcggcggccagaggggcgtttcaaaacgtcttcaagttcgagttctccctagagaccccgctcactatacacaccagatggccctacctccccctggagataggcatagcgtggcaccccatcctcaacgtgccctacatcccggcgagctccctcaagggagccctcagggcggccgcgcccgagcccgtctgcgacttcaccaaggcggagctcttcggcaccgcccaggaggaggggctgttggtggtcttcgacgcgtaccccaccggcggcaaggcggtgaggccagacgtggtgacgccccactacagagaggtggagggcgagatagcggagactcaggcgagccccgtccccctcgtcttccccaccgtccccccgggcacaaagttccagttcatggtgggaattctgccgagagacgaaaagagggaggttgactataagaagtgcgagatggagttgttcgacgcagtgaagaagacgctggtgaggggactgggcgcgaagaccgcagtagggtacggcgtcttcaaaatttaa

SEQ ID NO: 1216 - protein, 262 aa, Thermoproteus neutrophilus
MKRPKKREEREVDYGKYFSSCAGDYNVVSCVNLAFLEASRDLARQNIRLRIPEFSRWAVLTLHQRPPQMWDQVKRYLELVYAAARGAFQNVFKFEFSLETPLTIHTRWPYLPLEIGIAWHPILNVPYIPASSLKGALRAAAPEPVCDFTKAELFGTAQEEGLLVVFDAYPTGGKAVRPDVVTPHYREVEGEIAETQASPVPLVFPTVPPGTKFQFMVGILPRDEKREVDYKKCEMELFDAVKKTLVRGLGAKTAVGYGVFKI

SEQ ID NO: 1217 - DNA, 30 bp, Thermosipho melanesiensis
gtttagaatctacctatgaggaatggaaac

SEQ ID NO: 1218 - DNA, 1128 bp, Thermosipho melanesiensis
gtgaaaacattaattaatacagttggagcaagtttaattaataatttgcagaaaattgggttgaaagaagcttttgaaaatggagaaatagataaaataacaaaaagtcttttagaaattgaaggaaatccagaaaatctaagagaatttggcgcagaaataaattcaatagtaagtattataaagaaaggttacttaacagaaaggaaaaatttgtattttttagtttcggatactgacgaaggaaagaaaattggagagattttaaagggttattttgaaaatattaaaaattttaattttgaaaaagttactgtttgtgtaatagaaaaacttaatgatgctagaccttatgattttaaaatacatggattgaggaatttaataaagaagattgcggaatttgtaagaaaacattatggagaagttattataaatgctacaggtggatataaagcacaaatagcttttgctttagcccttggtcaaactttaaaggtgcctgtctactatagatttgaaagatttcctgaagttatagaactagaacctttaccattagatttggataaaaattactactttttagcaagaaatttatttgaacaaatagataatagtttaggaaaatttgttgagtttggtgaagtggaaattcaatataagattttaccagtggaagcaaagattttttttgatattgaaaaaattgatggcaaaaaatatttatctataagtccaatgggacaaatatatttagaatctattagaagtaaattttattttttaaacaaagaaatacaattggaaaaaagaaaaggtgaaattaagtttattagtagtggtaaagaaggacattctattcagattattaataattatagtttgaaagatttatttgaaagatttaaatatattacaagtttaagggttacaagagcatctcaaagtgaacgtacaagtagttcaaaagttaagatagttggaaacaaattgataattatattacatacaaaaaaaggtttaatacattttgaagctgaaacaacagcaagaaatgaagaagagttagaaataataagattaagattagaagagtttttagatgaaaattttgatggtagatga

SEQ ID NO: 1219 - protein, 375 aa, Thermosipho melanesiensis
MKTLINTVGASLINNLQKIGLKEAFENGEIDKITKSLLEIEGNPENLREFGAEINSIVSIIKKGYLTERKNLYFLVSDTDEGKKIGEILKGYFENIKNFNFEKVTVCVIEKLNDARPYDFKIHGLRNLIKKIAEFVRKHYGEVIINATGGYKAQIAFALALGQTLKVPVYYRFERFPEVIELEPLPLDLDKNYYFLARNLFEQIDNSLGKFVEFGEVEIQYKILPVEAKIFFDIEKIDGKKYLSISPMGQIYLESIRSKFYFLNKEIQLEKRKGEIKFISSGKEGHSIQIINNYSLKDLFERFKYITSLRVTRASQSERTSSSKVKIVGNKLIIILHTKKGLIHFEAETTARNEEELEIIRLRLEEFLDENFDGR

SEQ ID NO: 1220 - DNA, 1125 bp, Thermosipho melanesiensis
gtggaaaaattgaaattaactataaattttacaactccttcatttgcaagcaataatagaaaagattttaaactaacttctcaaacaataagaggtatcttaagattttggtttagagctattattccaagaattatcaacattcataaatacaatgaatgtgataaaaaatttataggattaaaaaaagcagaagaattaattttcggctctacggagagaaaatcatcttttgatttagtgattgaaacagttgataagcttttagaaaaaaataataaaaatacatattacttatatggtttggaaggcaggaaattttcaagagaaaattctgaatttaagctaattttttacataaaaaacaagcaaatggaagattcattgaaagatttgttaaaaaatcttttactgcttatttccaccgttggtggtattggtgcaaaatcaagaaagggattgggaagttttgaggtgttgggagaaaaaaagtatgaacttgaagaattattgaaaattctagataacataaacaaagaaatattcaagagaagaggatttgaatttgaacctacaaaatttgacaataagaatgtttcagattacccagtattaatggatggttattacgaattttttaccaaagaacttaaaactaaaagtttggaaaaagtttttgaaattctttttcataatagtagagatagaaatagaaaaggaatttacctcaaaacaaaatatgacttaagaatggaaggtaatgactcatttaaaaaagcaataaatgctttaaatttaaataaaagaactacaaatatcattttttaccaatctattttaggtttacctataaattattatattagaggaaaagggcaatttaaattagaatcaaaaggcaaagaaaatagaaaagcttctcccttatttatttcaattcacagagataaaaataacgactattttgtgaattttttgattatgaagagtaaattaacaagtgatttagaaccaaaattagtatttggtgcaagaaataaaatcaggaataagatcgaaataaagggaagtcacgaatacggtaaacttattagaaacttaagagataatttagaaaaagtttaa

SEQ ID NO: 1221 - protein, 374 aa, Thermosipho melanesiensis
MEKLKLTINFTTPSFASNNRKDFKLTSQTIRGILRFWFRAIIPRIINIHKYNECDKKFIGLKKAEELIFGSTERKSSFDLVIETVDKLLEKNNKNTYYLYGLEGRKFSRENSEFKLIFYIKNKQMEDSLKDLLKNLLLLISTVGGIGAKSRKGLGSFEVLGEKKYELEELLKILDNINKEIFKRRGFEFEPTKFDNKNVSDYPVLMDGYYEFFTKELKTKSLEKVFEILFHNSRDRNRKGIYLKTKYDLRMEGNDSFKKAINALNLNKRTTNIIFYQSILGLPINYYIRGKGQFKLESKGKENRKASPLFISIHRDKNNDYFVNFLIMKSKLTSDLEPKLVFGARNKIRNKIEIKGSHEYGKLIRNLRDNLEKV

SEQ ID NO: 1222 - DNA, 2196 bp, Thermosipho melanesiensis
gtggtttggaagaaaaaaattgaaatatataaatcaattagagatgtttttgattcaattttaaagggaaatattaatggagaaccaagtattttagctaaggtaaatgtaaattttttgcaggaacctgaagtcattcatcctcttacaggtgagagattaaagcttgaaaagcaagcgttaaaaaatcttttggaaaatataaattttagtaaaatgaaaaactttgaattctcaaatgattttagaaaaactttctatgaattgtggtggaatattccaaaatatttagcaatcccatttataattccagagaatccaaagattcctttctcatcaataattgattatttagataatctttctgcgcagagcattactgacaatttgtctttattgcttgtatcaattggaccagttcaggaatttatagccgctgcaagaagtactatagatttgaaaatgggcagttacctgttatcttatttagtttttcagggaattaaagttattggtgaaggatacggatacgataatattatttttccatatatgcgtggaagttattttgttaaaaaagaatttgagaagtttggtataaaagttagtaattacttggctccttctgttgcatcattacctaatgtttttaccgctattgttccaactgatgaacttcaggaattaaaaaagaagatagaaattgcagtaaaaaccgaaatgcaacaaattagtgattttgtaaaatcatatgttttgaaaaatagaattattggtaatcaacaaatcaatttgttagatagattttcaaaaagttgggataagcaaattgctcaatttccaactataattatggttgaacaggagatgggaaatttaaaggagatagtggaacaacattttgaatatactaaagatgaaaatatcaaaaaactatttgaatctattgaaacattgggtatacctgaacaggtattttatggtgtttttagtgagctgcttggaataaaaagtgcgttaaggaaggcgacaagagattttattcaggtttacgaaaatagtatccagcatggtgatgatttaagtggagaaaataaatctttggtagagatattaacaaaatatggaaatgaagaaaaaaaagaaaaattgtcagccatatctacaattaaaaggttttttgtaaattatttagaaaaaataggatataaagaagcatatgaaaaattaaaaactataaaatctacagaggaaattgcgggaaagtacaaaatagctgcattaataatggatggagataatatggggaaatggatctctggtaagcttgcacctagcatgaaaaatagagtacatactaaggttatagaatattttgaaaaaaaccaaagtaatgagataaagaatttaaaaaacttaagattgatttcaccatcatatcaaagaacaataagtagaacgttgaataactttgcaaattttgtgccaaaaattgtggaggaattcgatggattgttgatatacgcaggaggagacgatgttttagctttattcccatcaaataaagtttttgaagcggcaaataaaataagaaaagtatattcaggaattggtaatattaaaatagacaattttatttttaaagatggatggtgctatattaatgatgaaaaaataccattgtttaacatgatggggaaaaaactaacaatgagtgtaggaatctcaattgcaaatagtaagtttaatttaaaaatgcttttaaatttggctagaaatatggaaaaacttgcaaaaagtaatgtcaaaaatggtagagagaaaagtagctttgcagttgctacaattagaagaagtggtcaaataaaagaatctaaaattttctgggaagtaaatgattatgatgttataaatgaagcacagaattttatcaaaaaatatgaaagcaagaaatcaatgaaaagggtagtaatcagaataatgcatgaatttgaaaattttggagtacctgataatataatttcccttgaggaatttaaaggtaaagttattccttttattgctgaaaaaatattttttaatgatttgtgtgatgagaaatttttagatattaaagataaggaagaatttgaagaatatcttagggtgcttgagaatttagagtatgcaagaaaggagaatgaaaatgaagattaa

SEQ ID NO: 1223 - protein, 731 aa, Thermosipho melanesiensis
MVWKKKIEIYKSIRDVFDSILKGNINGEPSILAKVNVNFLQEPEVIHPLTGERLKLEKQALKNLLENINFSKMKNFEFSNDFRKTFYELWWNIPKYLAIPFIIPENPKIPFSSIIDYLDNLSAQSITDNLSLLLVSIGPVQEFIAAARSTIDLKMGSYLLSYLVFQGIKVIGEGYGYDNIIFPYMRGSYFVKKEFEKFGIKVSNYLAPSVASLPNVFTAIVPTDELQELKKKIEIAVKTEMQQISDFVKSYVLKNRIIGNQQINLLDRFSKSWDKQIAQFPTIIMVEQEMGNLKEIVEQHFEYTKDENIKKLFESIETLGIPEQVFYGVFSELLGIKSALRKATRDFIQVYENSIQHGDDLSGENKSLVEILTKYGNEEKKEKLSAISTIKRFFVNYLEKIGYKEAYEKLKTIKSTEEIAGKYKIAALIMDGDNMGKWISGKLAPSMKNRVHTKVIEYFEKNQSNEIKNLKNLRLISPSYQRTISRTLNNFANFVPKIVEEFDGLLIYAGGDDVLALFPSNKVFEAANKIRKVYSGIGNIKIDNFIFKDGWCYINDEKIPLFNMMGKKLTMSVGISIANSKFNLKMLLNLARNMEKLAKSNVKNGREKSSFAVATIRRSGQIKESKIFWEVNDYDVINEAQNFIKKYESKKSMKRVVIRIMHEFENFGVPDNIISLEEFKGKVIPFIAEKIFFNDLCDEKFLDIKDKEEFEEYLRVLENLEYARKENENED

SEQ ID NO: 1224 - DNA, 972 bp, Thermosipho melanesiensis
atgaagattaaggttttatatataaaacctattgatgttataggttttagaaaatcgaaaactttttctactactgaagcatctatatttccaaacccaaaaacattttacggagcaatatttgctgcttaccttagaaagaacaaacttagtgtagatgatattgaaaaaattattgaaaataaaaaattaagtattattggaccgtttttatccaatgcatatggagaaatattttttaaaattccaaccatagtaaagcaaaatgaaaaaactggaaagtttttaaaggcttttgttgattggaattttagtttttatgtgaataataaaaaattgcaagggattaggtatgaaaatatgagggatttaaaagaaccaaaaagaagatatatatctttaaaagaattagaaaaattgaaaattggaaggttagatttagataatgaaatatgcgaaatatataaacatgaaagtaaaattggagttgcattaaaaaataggaaatcaatagatggtatgctttattctttaacatactatagatttgaagaaaatgcaggttttgctttttttgtagaaaatgacgaattaaatatattaaatgagcttgatttaataaaaattggtttaaaaggaaaactagcaagattagaaattggtgaagtagaaacgtctgtatttgataagataaatgataataaaaagggaatattactattaactccttcatattttgaaaacgggctcttacctaagcaggatggaaatataattgcaattgcaaattataaaccggaaagtattggattttgggatctaaaaaataatagacctggagaaatgtttaaagtagttcctgcgggaagtgtgtactttattgatggtgatttaccgaatagttataaagaaaatttcacagataaatttcaggaatttaattttggaagatacatagaaataaaattataa

SEQ ID NO: 1225 - protein, 323 aa, Thermosipho melanesiensis
MKIKVLYIKPIDVIGFRKSKTFSTTEASIFPNPKTFYGAIFAAYLRKNKLSVDDIEKIIENKKLSIIGPFLSNAYGEIFFKIPTIVKQNEKTGKFLKAFVDWNFSFYVNNKKLQGIRYENMRDLKEPKRRYISLKELEKLKIGRLDLDNEICEIYKHESKIGVALKNRKSIDGMLYSLTYYRFEENAGFAFFVENDELNILNELDLIKIGLKGKLARLEIGEVETSVFDKINDNKKGILLLTPSYFENGLLPKQDGNIIAIANYKPESIGFWDLKNNRPGEMFKVVPAGSVYFIDGDLPNSYKENFTDKFQEFNFGRYIEIKL

SEQ ID NO: 1226 - DNA, 831 bp, Thermosipho melanesiensis
atgaatggaaaagtgggatttttatacgcagttactcaaattcatgcgggaaaaggcatggatttaggtgttattgatcaaccaattcaaagggaaattcatacaggtttccctataatttcaggaataaaaggagctttaagacatgaaataaactttgaaaacaaagaagaaatttttggttctgaggcaaataaagataaagagaattccaaacctggtgacatagtattttcagaagtaaaaattttattttttccagttagaagtttaaataaaggattagtttggataacttgtcctatggttttaagtagattaaaaacagcatttaaaattgttgggaataatgacttatctaaaaaaatagaagattttttgaaaaatataaatcataatgaaaaatacactacttttgaaaaggaagaggttgtaagtttagaagaatattctataaagccaaaaaggtctgataaattaattgaaatagttgaaagtttaaaggagatagttccagatgattatttatcaaatatgttaacaaaaaatgtagtagttcttagtgagaaagattttactttttttgtaagaaatgcaactgaaattcttccaagggttagaattgataaaagtacaagagtagttgcaaagggagcattgtggtatgaagaatacttaccacaggatactgtaatgttttttattattaaatcttttactgacaatagcgaattacttaattttgtctctaaaaaaattgatggaaattatataaatatcggtggaaaaacaagtgtaggtaaaggttttacttacattaaattattgtga

SEQ ID NO: 1227 - protein, 276 aa, Thermosipho melanesiensis
MNGKVGFLYAVTQIHAGKGMDLGVIDQPIQREIHTGFPIISGIKGALRHEINFENKEEIFGSEANKDKENSKPGDIVFSEVKILFFPVRSLNKGLVWITCPMVLSRLKTAFKIVGNNDLSKKIEDFLKNINHNEKYTTFEKEEVVSLEEYSIKPKRSDKLIEIVESLKEIVPDDYLSNMLTKNVVVLSEKDFTFFVRNATEILPRVRIDKSTRVVAKGALWYEEYLPQDTVMFFIIKSFTDNSELLNFVSKKIDGNYINIGGKTSVGKGFTYIKLL

SEQ ID NO: 1228 - DNA, 372 bp, Thermosipho melanesiensis
atggaaagagaaaataaaacaaaactaattgcaaaacaacttattgtagaaaaaacttcgagaaatgacttggaattgaaaagttataagtcactaattaaaggattaggggctatgattattcaaaatggattgtacggcacattggtttttttaaaagcaaaaggagaaaataaaacttctaaaaaacattatcattatgtttttgaggatataaaacattttttgaacgaaaaaggattatttagtaataatgatatacttgaatatcttgagagaacagaaaatctttctgagatacaggagagagttcttgagcttgtaaattggtatcgaagatatgtagagatttttatttctgatgaagattaa

SEQ ID NO: 1229 - protein, 123 aa, Thermosipho melanesiensis
MERENKTKLIAKQLIVEKTSRNDLELKSYKSLIKGLGAMIIQNGLYGTLVFLKAKGENKTSKKHYHYVFEDIKHFLNEKGLFSNNDILEYLERTENLSEIQERVLELVNWYRRYVEIFISDED

SEQ ID NO: 1230 - DNA, 816 bp, Thermosipho melanesiensis
atgaattattataaatatgatatagagaaacttaaagataagaattcatttattaaaaacgcaagtttatattacaataaattcgtatttaaggaattggtagtgttaaataacaaaattacatctaaatcatttaaaaaatctttgaaggaaataagagaaagatataaagacgttttaatttctattattaaaaacttatttgaatcttcaaaatcgggaagtgattctttacaagaaataattaactccttacgaaaaataagggaaaattttatcaattctttaaaacaaagatatattatattgagttataccttagaagttaaaactccatttttaataggtgcaggaataccttccatcgatgaaataggcttttattggttgagaaattatggaataccagttattcctggaacaagcataaaaggatgtttcaagagttgtctattagatgttttgaaggattacttagaagagatattcggaacagaagacaaaatgggaaaagtaatttttcttgatgcaatacctttaggtgaaatttgtttaggaattgattttcaaacaccacattttcaaaaatattacattgataacaaaccaccaaatgatgtttataatcctgtgccactgagtttcttgcatgtaagtaagggaagatttagattggatatactaattgataaagatgaaggtaatattgctgataaaattaaaaatcacataaagatttttttagaagaatatggagtcggtgctaaaacatctatgggctatggaagatttaaaattataaatcaaaatagttaa

SEQ ID NO: 1231 - protein, 271 aa, Thermosipho melanesiensis
MNYYKYDIEKLKDKNSFIKNASLYYNKFVFKELVVLNNKITSKSFKKSLKEIRERYKDVLISIIKNLFESSKSGSDSLQEIINSLRKIRENFINSLKQRYIILSYTLEVKTPFLIGAGIPSIDEIGFYWLRNYGIPVIPGTSIKGCFKSCLLDVLKDYLEEIFGTEDKMGKVIFLDAIPLGEICLGIDFQTPHFQKYYIDNKPPNDVYNPVPLSFLHVSKGRFRLDILIDKDEGNIADKIKNHIKIFLEEYGVGAKTSMGYGRFKIINQNS

SEQ ID NO: 1232 - DNA, 30 bp, Thermotoga lettingae
gtttcaatcgaaccttagagggatggaaac

SEQ ID NO: 1233 - DNA, 861 bp, Thermotoga lettingae
atgtgggagtacgaaaaagtctttgcaagagcccttgatcctgttcacatcggagcaggaggatatagattgggcagagtggataacactattgtgagagatccagcaacagatgtaccaaagattccaggaacttccatctcaggagtgataagggcatttgcagaagctgttaaagaagaagatgaaaagaaaagcgatacagacaaaatactcaaaggtattgatattgaagagttatttggaactgaaacaaaaaagggtattttacgtttttatgatggccagataatcttctttcctgtctcttcgatccagggcacagtatggataaccacaaaagaacttctcaactactggtttggcgtaaaaaatgaaattccagatggcctgggagataaagcttttgcactttgtggaatagatacaacaaagccgctgaaccttggttggttgttactcgaaattgagaaaaatcaatctcctctttctcaaatagttaattgggtgaaaaggattgttgttttgtcagacaagcttttttctcacattataaacgacaatcttgaagtgagaacttctgtgaaaatagacaaagataccggcacagcggtagaaggagctcttttcacctatgaagcgataccaagaggtacaatctttggctttgaaatttgccacgataagacacgaaactctatttcaggcaacgtgataaaggcaataatgaatgccgttagcccatatctcaaaaatctcggcataggcggaatgggtacaaggggatttggaagattggaattgctgcttaacaacgtcgacagtggttcaacggggggcgtgaatgatgcacaatcttga

SEQ ID NO: 1234 - protein, 286 aa, Thermotoga lettingae
MWEYEKVFARALDPVHIGAGGYRLGRVDNTIVRDPATDVPKIPGTSISGVIRAFAEAVKEEDEKKSDTDKILKGIDIEELFGTETKKGILRFYDGQIIFFPVSSIQGTVWITTKELLNYWFGVKNEIPDGLGDKAFALCGIDTTKPLNLGWLLLEIEKNQSPLSQIVNWVKRIVVLSDKLFSHIINDNLEVRTSVKIDKDTGTAVEGALFTYEAIPRGTIFGFEICHDKTRNSISGNVIKAIMNAVSPYLKNLGIGGMGTRGFGRLELLLNNVDSGSTGGVNDAQS

SEQ ID NO: 1235 - DNA, 369 bp, Thermotoga lettingae
atgatgcacaatcttgactttgagtgcatgaaaattgcccaggaaattttaacatcgagcactgataaggacaaattagaaaacaacttaagaaaagcccttggtgttcttcaagaagatggcatttatgcaatgtttctgtggcttgaggataaagataaaacagtcagagaaaaactcacaggtttgttgaatgaacctgagataaaaagatatcttttgaatgattcagaaagatttgacgaagattttgctattctctgcagaaacctggtagaagtcgcaaaagatatagataaattacttttcatgaaaagaattattgagcgtgcgttgatctatgcgttgtatcatgcaaaaatcgggtga

SEQ ID NO: 1236 - protein, 122 aa, Thermotoga lettingae
MMHNLDFECMKIAQEILTSSTDKDKLENNLRKALGVLQEDGIYAMFLWLEDKDKTVREKLTGLLNEPEIKRYLLNDSERFDEDFAILCRNLVEVAKDIDKLLFMKRIIERALIYALYHAKIG

SEQ ID NO: 1237 - DNA, 903 bp, Thermotoga lettingae
atgtggaaaaaactcaatgtcgtcttcagattgaagagccctcttcacataggctatatgcctttcgaagtgtttgtgttttctcccacgcgttactatgttcctggaagaaatttctggggcgctataacaaagagaataacagaatatctgtatgaaaaaccaaaagcggaaaattacaaagatatcggcgtgaaggttatgaagaatttcaggttttcttatttctacgtctatgatggaaaaacggtttattttccgtgttatacagaaaatggtttgaaatatggagacaacagccatgagataaccaaatcagaattcgaatacaggttcatagggagttttgtttcaactgcgattgataccactggaactgcaaaagataaaagtcttcacgaaatagagttcataaacagcaggttcaaagatgaaaatggaaacacaaaagatgtgaaaatagccgggtgtatctggataaaagaagatacagaaatagaaaaaataattttgggtgaaggcatattcatagaaaattccaacgtgatagaagaactcattcttggtggagaatcgaagtatggttttggtcatgttgttttggaatcaatcaatgagatttcagtttttgaatggaacgatcctgaaagtgtggaaataggaagcaagcttcttcctgcccatttgaagtatgatgaaaatttaaaattcaagggagatatagagcttctcacggggagaggatattacgatccgaattcaacagaaactgcaggtggtaataaaccgggagctgccatatcgattcctgaatattactttgtcccagggacgatcctaatggaatctaaaaaattcaaagtgagatgggacggcaccttagaggtgagcaaaaatggatga

SEQ ID NO: 1238 - protein, 300 aa, Thermotoga lettingae
MWKKLNVVFRLKSPLHIGYMPFEVFVFSPTRYYVPGRNFWGAITKRITEYLYEKPKAENYKDIGVKVMKNFRFSYFYVYDGKTVYFPCYTENGLKYGDNSHEITKSEFEYRFIGSFVSTAIDTTGTAKDKSLHEIEFINSRFKDENGNTKDVKIAGCIWIKEDTEIEKIILGEGIFIENSNVIEELILGGESKYGFGHVVLESINEISVFEWNDPESVEIGSKLLPAHLKYDENLKFKGDIELLTGRGYYDPNSTETAGGNKPGAAISIPEYYFVPGTILMESKKFKVRWDGTLEVSKNG

SEQ ID NO: 1239 - DNA, 1008 bp, Thermotoga lettingae
atggatgaatacaccatcaagataaaggcgttgacacccatatggacgggaaatgcaaatagaaaatgtgaaactcttagagaaacaggtatcattggaagtttaagatggtggtacgaagcgctgatcaggggattgggtgggtatgcatgtgatccaacaattgatggcaggtgctcattggaccaaaaaaggtttaaagaagctctgaaaaatggtaaatctcaacaaaaagcactgagtgaacaaatatgcccagcatgtcagttgtttggctgcacaggatgggccaggaagtttgttttgcacattttggataaggatggaaaagttaaagtggggtgtgccaaggaaaatgaagaattgattttcaaattcatatctttaaaaggaataagcacagaagaatggtcacttctcaatttaacgcttcattttatagctgaatatggagcaattggtggcaaaactgtgtttaagccttcagatgaaaatggacgtgaagacaagcatcatcattcagatttcggattgatagaaatcatagaatcaaaactgagcattttaccaaaagaagatttagaaaattacgtgaaaagctccttgcaatatcacatgaatcgagaaagcccaaagtgggtttccataaagaatttctggtgtgtcaaaggaaagtatcttgctcgtcaagacagtaataacagtacattcaataaggttttgggaagaaaggaacccaaaaatcaagcaaggggattatccaactcgaacgatactatctccaaatggcttgctggctctcaaagagagagtaagaagatcttcagtttcaaaacttttcccagaacatttggctttatcaatccagatattcagatagattttgacaccattaaggcgcgactcaaagaggcctggaaagaagaaaacggatggaaatttttaaagggcgaagaggccctggatcttttgtatgaaaaatactggaggggtcagagtggtgcatga

SEQ ID NO: 1240 - protein, 335 aa, Thermotoga lettingae
MDEYTIKIKALTPIWTGNANRKCETLRETGIIGSLRWWYEALIRGLGGYACDPTIDGRCSLDQKRFKEALKNGKSQQKALSEQICPACQLFGCTGWARKFVLHILDKDGKVKVGCAKENEELIFKFISLKGISTEEWSLLNLTLHFIAEYGAIGGKTVFKPSDENGREDKHHHSDFGLIEIIESKLSILPKEDLENYVKSSLQYHMNRESPKWVSIKNFWCVKGKYLARQDSNNSTFNKVLGRKEPKNQARGLSNSNDTISKWLAGSQRESKKIFSFKTFPRTFGFINPDIQIDFDTIKARLKEAWKEENGWKFLKGEEALDLLYEKYWRGQSGA

SEQ ID NO: 1241 - DNA, 849 bp, Thermotoga lettingae
gtggtgcatgattattatttatcaaaggtaaagataaaagatttcaatgaatggaacaaggaaaaggaaaaacagtatttggaagaagtattcattcttccactggccaaagagaaagataagttaaagaataaatctaaaaatgaagacatacacgtcttttaccccaaagaagaagatttagcatatcttcccaacggctctgtattgatcaaaatcactttcaccctcaaaaagccatacacaagtaaagacgagggagagtttcatattatcgatgacaaaatttttgaaaacccgatcgtcagagacaagttcacaggacttccaatggtcagaccttcaacgtggaaaggccatctgagatttgctgccgaaagagttgactgtcaaaacaaaaaagaaatcataaatcgcctctttggttcagaaactgaagacgaagaaaaattaaaaggaaggctctattttttcccaacattttttgaagaagattcaaaaaaagatgtcatcacaccgcttaaaagagataccagaacaccagccagaggtccaatatttatggaagttatgaagcagggtagtaaaggtgagttctatcttctgtacgttccttatcccaaaggaaaaaattttgaagaaaaacaaatcggagaggatctacattttcttgcgagcgctttgaaacttatgttctatacctatggattttcggcaaaaaagacatctggtttcgggacaattgaggaactgaaagaagaaaacatagaaatttaccccaaagacaaaaaagggattttctcaatattatacaccacacataacaatagcgttaaggatggtgtataa

SEQ ID NO: 1242 - protein, 282 aa, Thermotoga lettingae
MVHDYYLSKVKIKDFNEWNKEKEKQYLEEVFILPLAKEKDKLKNKSKNEDIHVFYPKEEDLAYLPNGSVLIKITFTLKKPYTSKDEGEFHIIDDKIFENPIVRDKFTGLPMVRPSTWKGHLRFAAERVDCQNKKEIINRLFGSETEDEEKLKGRLYFFPTFFEEDSKKDVITPLKRDTRTPARGPIFMEVMKQGSKGEFYLLYVPYPKGKNFEEKQIGEDLHFLASALKLMFYTYGFSAKKTSGFGTIEELKEENIEIYPKDKKGIFSILYTTHNNSVKDGV

SEQ ID NO: 1243 - DNA, 759 bp, Thermotoga lettingae
atgagaatcaacctgctggatcgtcttgcaaaaaggggtaatacttttacctttgaggaagtggttgagacattcaatatttcaagaaaaactctgtgggtaattttgagtcgccttgaaaagcgaggatggattgaaagaatagaaaagggaaaatatatgatcattcctcttggcgccgaaaagggtaaatacactctgagtgagtttgttattgcttccactcttgttaagccctatgcgattgcttactggagcgctcttcattactatggtttgactgaacagataccaagtacagtgtttgttcaaaccacatcaaggaagaaagagcaaaccctcgaaatttttggaattaattacagaatagtaagagtagcacaaacgaagttttttggctttcgaaaagaatggatagaggaaactcaaataactattacagacagagaaaagacaattatagattgtctggataaacctcaatacagtggaggaataatagaagtagcaaaatccttgaagaatggaagatttgataaagataaattagtatcatacgctgagaaaataaataattctgctgttctcaggcgacttgggtttttgtgtgaatttttgagaattgagataaacctaccagaaattgagacgaggaattacctgtatcttgatccaacaatgccaaagaatggaatcaaagatgcaaaatggcatctgatcgtgaatcttgatgagaaaattctgggggcgctggaatga

SEQ ID NO: 1244 - protein, 252 aa, Thermotoga lettingae
MRINLLDRLAKRGNTFTFEEVVETFNISRKTLWVILSRLEKRGWIERIEKGKYMIIPLGAEKGKYTLSEFVIASTLVKPYAIAYWSALHYYGLTEQIPSTVFVQTTSRKKEQTLEIFGINYRIVRVAQTKFFGFRKEWIEETQITITDREKTIIDCLDKPQYSGGIIEVAKSLKNGRFDKDKLVSYAEKINNSAVLRRLGFLCEFLRIEINLPEIETRNYLYLDPTMPKNGIKDAKWHLIVNLDEKILGALE

SEQ ID NO: 1245 - DNA, 3657 bp, Thermotoga lettingae
atgattacgcaaaacgaaatgaagcagaaagcgagggaatacggggtaaatccatcaactattgaaagagattatgctcagaattggctattaatggctttgtcttcccttcctttagttttgaagggaggaactggcataaggaaagtgtatataagtaattacagattctctgatgatcttgatttcactctgcttgaggaatttagtgcagaagaatttaaaacaactatcgataaagttattgaaaaggcaagggaagaaagtggaatgaattttttcgaggattttgagtttcagaaaaataataacggttttgagattgatacttactttcagtttatgcagagaggtgaaaatagaaccaaaataaagttggatataacaaaagctaagaatgaaagaatattactacccgtgctcagggaaaagataattcacctttattctgatgacctggactgtgaagtaaaagtatattctctggaagaaatagtagcagaaaaaataaggagtctgtttcaaagaacacggccaagagatttatatgatgtttggtatctatggagtaagacgaatgatatcgacagaagaaaggttcttaaaattcttcctgaaaaattcaaagaaaaaggggttgtagttgacatccaggatcttgaaagcaggaaaaatgatttcagaaatgcatgggaaatttctcttggtcatcaattaaaggaactgccagattttgaaacggtgttttcaattgtacttcaagaggtgaagactatgtgtgttgaaatgattaaaaacaacagagagatgatattgatcggggaaatctgtgcactacttcatgatattggaaaactccatcctaattttatcaaaacacagtctgtagaaggcataaaaggactgcctcatcattccggaggtatagatcagcttattaaagcagagctaattgattttttcaaaagcatagatatgaagataaacactgaaagcatgtcgatatacgattccatcagatttcatcatgataactcaacgaataacattttaaagtgtttaaaagaatgtgacaggaaagactctgctgatgacaagggtatagtaaggagaaagcagcacttggatagcacatggatttcttcgccgtttggtcatccaaaagagaaaatagacctgaactgcctccaaaaaatatttgatgatcttcaagacgaattgattgaactcttcaagaattatcggtcgttagatgcaaagcatctcagaagcaatctgatcaacattctcaaaaccccattttctcatgcccttggggaaacaagaattccggcaaacgatgtcactttgtgggatcattcttattcaacagcatctttgtttaaatctgttttagctgcaataacatgtggaacaaatccaaatcctcaggatttaaaatggagaatattcgctatatgctggaatggaatggaattcataaacaaaggaaaaaaggtggctgagatccagtcaagaaacgatgtgatagaaaatctcaagaagaagttaacggggattttcgaggaagaaattcctgtgggtaatgtggtctttgaagacatgaatggaatttatttcactttcccagacctgaacagggcttgtgatcttgcagaagaatgtgcaaaaattgctttagaaacgattcaaaaagaaacccagaacgaactgtggccatttttcatcttgagtgaggcaacccgaactctcacgatcattgctaatgtacagagatctgcattcgaaaagaaaaaggtacccaaaatgacaccagtattatttgttgaagataaggaaagatatctggaaaatcctgatcttccatcctttactgttagacaaagcatatgtcctgtttgtggtatcagaccaagagatgaaggaaaagaaagatgcaaaatatgttataagcgaaggcaaggaaggctttcaaaatggctttcaaacagagaagaaactatatggatagacgaagttgcagataaaaacaacaaaattgctttgatatctttgaatttttaccttgataaatggctcgatggaacaatggtaggaacaatttattcgcagacatttgaagattggttgaactctaaaaaagcaaaaaagttttttgaaaataaacaaaacattcaaaagttaagaaataaaggagtaaatatagaaaaaaagaataatatgaatctgtcgaaggagttactcaaaactattacagatgaggatattaaagaggatgctggatttaaaagcaatttaataaacacattttttgaagatattagctcttcacaggatcattcatctgatggaaattatgtcgaaagatttgttaataacttaaaggaacgattaaaacctgaaccatttaatccatctaacctacaaaaattgcttttcacccagaacccgtctcctgcccgattgtacaggatatggcaggaaacaactgaattctttgatttggtagttagtgaggtaaaaaataagatctacagcaataaatggaaaagaataaagtttttcgtaaattatactgacttaaaatctaaactaaagcaagggatgggaatagaagagaaaactccttacttagttcaaatagatgatttaaagccacaaaaactactcgtttttcacgatgaaaatggagaattctatacaatagaatctcttggaaaattcaagtttaacaataacataggggaagaagctgttaaagaggcgctaaaacaggaatttaagcatctcgctccagaagatgatccagacgaaaatctattgaacaaatcagtaaagcccgacgaaaataatataaaaatagaagaatactatccattaattgaaatcaacaaatccccattctcacttcgcctaatagttcccgcgcaagactcgatgaaaatcatagctctggttacagatctatacaacgaaatgtttaaaagagttataggaaagctttctttaaacatcaagctccttgtgacaaaaagaaaattccctctttatttatttctcgatgcagaaaacagaatgcttgaggatgaagaattcaaaaaacaagtggcaatggatccatggtggaatattcaaagacacgatgagttctatggtttttatcctgcaaagcccgtagaacatgagaacaaatatactctcgatgatctgaatccaatctctaaaggaaagatcttctatctctatccaggatatttcgacttcgatctactttcggaaaatacagacagatacaatatagcttattcaaaaggagagaagataaaaagagcagatgagatctacagactcctcacagaaagaccatattatttttatgaaatttctgaaatactcgagttgtgggatgttctaacgaatctaaccagttcacagatacattttgttgaagaagctctcactttaaaaatcagggaatggagagaggtaaaagacagagaaaatgtgttcatgaactttgcagaggcaactctaaaagatgcttttaacaacaagtgggacaaattgagagatgaaacaaaatggtttcttttgaaatcagcctgtaatggtcttttgcttgatactataaaccttttcaaaagaacactcgcgtag

SEQ ID NO: 1246 - protein, 1218 aa, Thermotoga lettingae
MITQNEMKQKAREYGVNPSTIERDYAQNWLLMALSSLPLVLKGGTGIRKVYISNYRFSDDLDFTLLEEFSAEEFKTTIDKVIEKAREESGMNFFEDFEFQKNNNGFEIDTYFQFMQRGENRTKIKLDITKAKNERILLPVLREKIIHLYSDDLDCEVKVYSLEEIVAEKIRSLFQRTRPRDLYDVWYLWSKTNDIDRRKVLKILPEKFKEKGVVVDIQDLESRKNDFRNAWEISLGHQLKELPDFETVFSIVLQEVKTMCVEMIKNNREMILIGEICALLHDIGKLHPNFIKTQSVEGIKGLPHHSGGIDQLIKAELIDFFKSIDMKINTESMSIYDSIRFHHDNSTNNILKCLKECDRKDSADDKGIVRRKQHLDSTWISSPFGHPKEKIDLNCLQKIFDDLQDELIELFKNYRSLDAKHLRSNLINILKTPFSHALGETRIPANDVTLWDHSYSTASLFKSVLAAITCGTNPNPQDLKWRIFAICWNGMEFINKGKKVAEIQSRNDVIENLKKKLTGIFEEEIPVGNVVFEDMNGIYFTFPDLNRACDLAEECAKIALETIQKETQNELWPFFILSEATRTLTIIANVQRSAFEKKKVPKMTPVLFVEDKERYLENPDLPSFTVRQSICPVCGIRPRDEGKERCKICYKRRQGRLSKWLSNREETIWIDEVADKNNKIALISLNFYLDKWLDGTMVGTIYSQTFEDWLNSKKAKKFFENKQNIQKLRNKGVNIEKKNNMNLSKELLKTITDEDIKEDAGFKSNLINTFFEDISSSQDHSSDGNYVERFVNNLKERLKPEPFNPSNLQKLLFTQNPSPARLYRIWQETTEFFDLVVSEVKNKIYSNKWKRIKFFVNYTDLKSKLKQGMGIEEKTPYLVQIDDLKPQKLLVFHDENGEFYTIESLGKFKFNNNIGEEAVKEALKQEFKHLAPEDDPDENLLNKSVKPDENNIKIEEYYPLIEINKSPFSLRLIVPAQDSMKIIALVTDLYNEMFKRVIGKLSLNIKLLVTKRKFPLYLFLDAENRMLEDEEFKKQVAMDPWWNIQRHDEFYGFYPAKPVEHENKYTLDDLNPISKGKIFYLYPGYFDFDLLSENTDRYNIAYSKGEKIKRADEIYRLLTERPYYFYEISEILELWDVLTNLTSSQIHFVEEALTLKIREWREVKDRENVFMNFAEATLKDAFNNKWDKLRDETKWFLLKSACNGLLLDTINLFKRTLA

SEQ ID NO: 1247 - DNA, 30 bp, Thermotoga maritima
gtttcaataattccttagaggtatggaaac

SEQ ID NO: 1248 - DNA, 735 bp, Thermotoga maritima
gtggtgaagagaatgaaactacctgaaagcaaaaatctcagtctttactgggaaaagtacagctttcttttgcttgagggttcaaactcaaaagataaagagatagtaagcaaaatcttccagaccgttgagaaattgcaatccgattttggaaagatcagcagtattctcaaagaaagaagggaacagctgatcaagaaaagaaaaccgtttatcaacttgaagatgagagtgaaaggaaaactcttgcttggggctgggaatccttcttctatcgaggtgggcataactctttccagaaattacggacttcccataattcctggcaccgctgtcaagggggcgtttgccagttttttattcgaattcgaaagggataaatacgaatcactcgctcatatttttggagacaccgaaagagagggtgacctcatttttcttgatgcaatacctgtttcggatttgaaattttcgctggatatcgtcaatccacacttccagccgtattatatgaaagaaaaacttcctccgaatgattggtacgaccctgttccaataaaatacttggtggtgagcagtggtgtgttctggtttaccgttcttgagagtcgttccggagttattggaaattcggaaaaggaactaataaaacagagattcgtggagatgctaaaagcttatggcttaggcgcaaaaacaagttatggttacggtcgtttcgaagagcccagctga

SEQ ID NO: 1249 - protein, 244 aa, Thermotoga maritima
MVKRMKLPESKNLSLYWEKYSFLLLEGSNSKDKEIVSKIFQTVEKLQSDFGKISSILKERREQLIKKRKPFINLKMRVKGKLLLGAGNPSSIEVGITLSRNYGLPIIPGTAVKGAFASFLFEFERDKYESLAHIFGDTEREGDLIFLDAIPVSDLKFSLDIVNPHFQPYYMKEKLPPNDWYDPVPIKYLVVSSGVFWFTVLESRSGVIGNSEKELIKQRFVEMLKAYGLGAKTSYGYGRFEEPS

SEQ ID NO: 1250 - DNA, 867 bp, Thermotoga maritima
atggaaggaagagtcttccttctttacgcggaaactcaggttcatgctggaactggtttcgaaataggagttgttgacctgcctattcagagggagagaaccacaaaatttcccattatacatggtataaaaggtgctttgagggcctacttcaggtctctcatcaaagaggacaagatagatgaaaaaaagatagaagagatatttggaagtgaaccgaaaagcgacaaaggaacggttcctggtagtttgagcttttctgaagcgagaattctccttttccctgtgagaaacccggataggctttttgtgtgggttacgtgtcctcttgtactgataaaatttgcgaaatctgtaggggataacgatgttgttaaagaactagaagaggcgaatattgattatggaaaggcagtctccttctatggatctggtgaggtgttccttgaggaagtaaaattagaaccatttgttggtgaacttccaaggacaagggaattgatatcgaagatttccaattgtgctccagttgactacctgaaaaagaaaatggaaagcgatgtggttgttgtgaatgatgttctcttctcagaaatcgttcaggctatgacagaagttgtaccgagagtgagaataaacagagagaagaaaaccgttgaagaaggtggtttgtggtacgaggaatatctgcctcaggatacggtgatgtactttgtggtgaggaagacgtactacggtaacaaagaagattccgggaaagattctttgatggaagttttcgaaaacgaagtaaatggagaattgatcaacatcggaggaaaagaaactgttggaaaaggcatgatgtgggtacatgcctggaggtga

SEQ ID NO: 1251 - protein, 288 aa, Thermotoga maritima
MEGRVFLLYAETQVHAGTGFEIGVVDLPIQRERTTKFPIIHGIKGALRAYFRSLIKEDKIDEKKIEEIFGSEPKSDKGTVPGSLSFSEARILLFPVRNPDRLFVWVTCPLVLIKFAKSVGDNDVVKELEEANIDYGKAVSFYGSGEVFLEEVKLEPFVGELPRTRELISKISNCAPVDYLKKKMESDVVVVNDVLFSEIVQAMTEVVPRVRINREKKTVEEGGLWYEEYLPQDTVMYFVVRKTYYGNKEDSGKDSLMEVFENEVNGELINIGGKETVGKGMMWVHAWR

SEQ ID NO: 1252 - DNA, 993 bp, Thermotoga maritima
atgaagctgtgggcgatatactttgagcctgaagactgggttggtttcagagagactagaagattttctttttctgatagggtggagagtgtttttccatcttcttttcctttttacggtgctgtgagaacggctcttttgatgaaaaatcagaaattcgatcccggagatgttgaaagagcaggagacgtaaggatgttcggcccttttgtttttgaaaatacccctgaaggaaggaagcactactttccacttccaagaaacatatataaaacggattctggctacagagtcacccccattgtcgagattgatggagtttaccttccctggaaacctgagtacaagatggatagtaaagaatctacgtctggagggctcatagaactgagtgatctcgaacttctcaggagtaacactcagggtgtgtgtaaattcgatcttgtttccgcggaaaaaatctttaagaaggaaacccacataggagtagcttttgaagaaaacagaaaaaaagtgaaagaaagaatgatatattcgatctcctactacagattttacgatggaggatttttcatgttcacagacgatgaaagaacggtcgagcttgtttcaaaactcgacggtgtgtttctcggaatgaagagcaaatggtcggcggtcgaggttgaagaactgaacaccaccgcttttgatcctccagactataagaatgtagcggttgctctcataacaccggctgttttcgatggaggagggatgccgaaggataaaactattcttggaaagagagttctcacaaccgcagggattagaaagcaggttgtttccggatgggacctacgcgaaaataaaccaaagaagatctatcatgctgtctctccgggagctgtttactatctggaaggtaaggtcaatggacatgtgctgaatgaaagtaaattcacggattttggttttggaagatgtatcttcatgaagtacgaaaaactttga

SEQ ID NO: 1253 - protein, 330 aa, Thermotoga maritima
MKLWAIYFEPEDWVGFRETRRFSFSDRVESVFPSSFPFYGAVRTALLMKNQKFDPGDVERAGDVRMFGPFVFENTPEGRKHYFPLPRNIYKTDSGYRVTPIVEIDGVYLPWKPEYKMDSKESTSGGLIELSDLELLRSNTQGVCKFDLVSAEKIFKKETHIGVAFEENRKKVKERMIYSISYYRFYDGGFFMFTDDERTVELVSKLDGVFLGMKSKWSAVEVEELNTTAFDPPDYKNVAVALITPAVFDGGGMPKDKTILGKRVLTTAGIRKQVVSGWDLRENKPKKIYHAVSPGAVYYLEGKVNGHVLNESKFTDFGFGRCIFMKYEKL

SEQ ID NO: 1254 - DNA, 2448 bp, Thermotoga maritima
atggatcaaaaaactcggcggaaaagaaatccaggggggataatcgtgagcaaaagagaagaattctggaaatctaagataaccgctcttcttcatgatccgctggtgaaggcattcgatgtgaaaaatcatgaaaacatagctggcgagattctaaagacccttggcatcaaaaaaacaagaggtgaagaagaccgtcttgcaagcgcaatggacaggtttccaatcccctacgaaaaggatgcaaaaaaacaaattcatgtttcgttcgatgagactctctttgttcatccattttctggtgaagggttaccggaagtgaagagtttctttcaaaatcaaaaagttgaagaaatgaagagccgtctgataaacgcattgacaaagctgaaagagaaaaacgacacgtatgaaaagctctttcattccatctggtggaatctgccttacattctggaaggaagtcagtttcttcctgctgataccagaatagccaatcactcgatcatagaccatctcgacgtaacatcggctctcaagggatgtgtagaggggaaacaggtgaaggcatctctagtagcggtagcgataggtcctgttcaagaagtgatagcccaggcaagaaaagtgaaagacctttgggctggaagttatcttctttcttatctcatctacggtgccatagaagttgttggcaaaaagtacggcttcgattccatcatctcaccgtatttgagaggaaactatttcgtcaaggaaacactcgaatcaatgggcgtagatcttgaagacctctgtcctgttcctcctcggagggaagtcgcttctcttccaaatctctttgttgcgatagttccatcctcggacgaagaaatactcaaagaatgtgaggaagcgataagaaacagatggaaaacaatagttgatgaaacaaaagaaaagctcagtaaaagcgaatttcttttcaacgagcattcgttcgattaccaatcgtctctctttccggacattcagacatcaaaggtgtctttcgatgaacctgaaaggatagttgaaacggtgagaaacttgttcacgggatcgggaattgaagatttcaaggaagttctgaagaaagtatcggaacacgctggttacaaagagaatcctgggacgttttacaggtacctccatcgtcttctgacctcaaaactcgctgcgagaaagatggccagactctttccgggatacgaagaggatgtttatcccgaccacttcactgacgcggacgattttggggctggagtcagagcctgtgctgtgttcaaagataaagatatagaaaaagacatagaaaaagaggacaggctcggaactctgaacactgtgaagagatttcttccggaaatcctcaatatcaggataaaattcgactcaacaacggatgttgcaagaaacaatcaggcaaataaggaaatcgaggatcccgaaaaattcaagaatggatacatagctgttctcctcatggatggagatcgaatgggtgattggatgcttggagagaacgcacctttcctggaaaaagtaataaatccgaaagtgattgagatgtttcaagaaacagatgatctcaaatatgcatgggaaaaactgaaggaattcaaaaccattcagccagcctatcacaggggtgtttcgaggacactcggtatcttctctcaacttgtcgggaaaattgttgatagacacaacgggatgctcgtttacagcggtggagacgatgttctggcacttcttccagcagacagcgtactggaatgtgcaaacgacatcagaaaattcttttcggggcacttggagtacgaaatagagattgaaagcggctctgatgtggaaagattcagatcagaaaacggtgttctgtaccacaacgacaagcctttcgctcctctgatgggaagagccgctactatgagcgctggaatcgctattgtccatcacaagtttcctcttcaggtagctctgaagatagcaagggaagcagagaagagagcaaagaacgtttacggaagaaacgcgttctgtgtgacgcaggtgaagagatcagggcaaatgatttttgctggatcaacatgggaaattgaagaagaagacgttgtcaagagatcgttgaaaatccttgaggagatgaaaaattacaatgtttcacaccgcagtctttacaaacttctctctccggacttctcgctctacgaggacaaaatggaaaagtttgtagagttcactttgagaagatcgatccattcagagaaatcgaagaatgagtttattggaaatttcaagaattttcttagtcgactgttagcttactacaaaaacacgaagaagtcctccttcgatgaagcaatgagagaagcactggaacttctcataatggtgtactcgatgaagagaggtgagtctcaatga

SEQ ID NO: 1255 - protein, 815 aa, Thermotoga maritima
MDQKTRRKRNPGGIIVSKREEFWKSKITALLHDPLVKAFDVKNHENIAGEILKTLGIKKTRGEEDRLASAMDRFPIPYEKDAKKQIHVSFDETLFVHPFSGEGLPEVKSFFQNQKVEEMKSRLINALTKLKEKNDTYEKLFHSIWWNLPYILEGSQFLPADTRIANHSIIDHLDVTSALKGCVEGKQVKASLVAVAIGPVQEVIAQARKVKDLWAGSYLLSYLIYGAIEVVGKKYGFDSIISPYLRGNYFVKETLESMGVDLEDLCPVPPRREVASLPNLFVAIVPSSDEEILKECEEAIRNRWKTIVDETKEKLSKSEFLFNEHSFDYQSSLFPDIQTSKVSFDEPERIVETVRNLFTGSGIEDFKEVLKKVSEHAGYKENPGTFYRYLHRLLTSKLAARKMARLFPGYEEDVYPDHFTDADDFGAGVRACAVFKDKDIEKDIEKEDRLGTLNTVKRFLPEILNIRIKFDSTTDVARNNQANKEIEDPEKFKNGYIAVLLMDGDRMGDWMLGENAPFLEKVINPKVIEMFQETDDLKYAWEKLKEFKTIQPAYHRGVSRTLGIFSQLVGKIVDRHNGMLVYSGGDDVLALLPADSVLECANDIRKFFSGHLEYEIEIESGSDVERFRSENGVLYHNDKPFAPLMGRAATMSAGIAIVHHKFPLQVALKIAREAEKRAKNVYGRNAFCVTQVKRSGQMIFAGSTWEIEEEDVVKRSLKILEEMKNYNVSHRSLYKLLSPDFSLYEDKMEKFVEFTLRRSIHSEKSKNEFIGNFKNFLSRLLAYYKNTKKSSFDEAMREALELLIMVYSMKRGESQ

SEQ ID NO: 1256 - DNA, 1329 bp, Thermotoga maritima
atggcttcatcttctgagggggtgagtgttttggagatcgaatgtaaggttgtaactcctatgttttcaagaggcgcagctgagccgaagtgggagaacggaaacagagtatatcccttcgagctgaggccgcaaagcatcaaaggggtcctcagattctggtttcgtgccatcgctccaacggtgatagacatatactcactcgaaggtttagaaaatctcagtaagaaagagaaagagagatgggaaaaagagaaatacaagggcttgaaatatcttgagggattgatcttcggatctcaggaaagaaaatcttcttttagtttggaggttaaggtggaaggagaatcgcaagctttgggaaaatacatgaataacaggttttcttttaccgatgaccgcttaaaagatacaaaatatgctttgtacggtttgtacgacaaaagtggaatttatgaatatctccaagaaggaaaaaattttatcataattctccagacggcaaacgatagtattaaaggaataattctgagtttgctcaaactcgtttccactttttccggttttggagcgaagacgaggaaaggttttggagaattcgagattgtggatccaaaacttactagaaatgactacaatctggtgatcagtgagtgtcaagagcacatcagagaatttgtgaatcatcacaattcgtcatcaaaagtaaaaatcaagttgggaagaaccaatttcaacggcataccggattttccctgtttttgcgattacaaaatttttgaaataacaaaatttagcgggaattctcctttagaagtcctaagagaggttttcaaagtagggagaaatttcaaggggtggtatccatctttaaaacaaaaaatgagattttctgagggcgattgtgttaaagatttggttgaggctttagaaggattgttgaaaggtagaaaaacagagaaaaagatcgagattccaactgctgtcgtcggccttcccattcaatatcagaacttaggaagaggagagataagaagactgaaagtcattgtctcttcttctctgagaggattgggcattgatgatatcgatgggagaaaagcttctccgcttttcctttcagttcacgaaggtgagagaggaaaatggaaattagttgttttgctgatgagaagcagggtaactaatgatggtgagttgataacagaagtcaaaggtggaaaaacaccttccagtggcatcaaaacgatagtgaaagaagaaaaagactacaagaatctcctcgaatggatcaaaaaactcggcggaaaagaaatccaggggggataa

SEQ ID NO: 1257 - protein, 442 aa, Thermotoga maritima
MASSSEGVSVLEIECKVVTPMFSRGAAEPKWENGNRVYPFELRPQSIKGVLRFWFRAIAPTVIDIYSLEGLENLSKKEKERWEKEKYKGLKYLEGLIFGSQERKSSFSLEVKVEGESQALGKYMNNRFSFTDDRLKDTKYALYGLYDKSGIYEYLQEGKNFIIILQTANDSIKGIILSLLKLVSTFSGFGAKTRKGFGEFEIVDPKLTRNDYNLVISECQEHIREFVNHHNSSSKVKIKLGRTNFNGIPDFPCFCDYKIFEITKFSGNSPLEVLREVFKVGRNFKGWYPSLKQKMRFSEGDCVKDLVEALEGLLKGRKTEKKIEIPTAVVGLPIQYQNLGRGEIRRLKVIVSSSLRGLGIDDIDGRKASPLFLSVHEGERGKWKLVVLLMRSRVTNDGELITEVKGGKTPSSGIKTIVKEEKDYKNLLEWIKKLGGKEIQGG

SEQ ID NO: 1258 - DNA, 264 bp, Thermotoga maritima
atgtacgtcataatggtttacgacgtgaacgaaaaaagagtagcaaaaattttgaaaatagccagaaaatacctcaaatgggttcaaaactccgttctggagggggaactttcccccggaaaatatgaaaagctgaaattggaggtttcaagactgatagacgagaaagaagactcagttagattttacgttatggactctcaaaaggtgttcaacctggaaactctgggagtggagaaaggagaagatggcttcatcttctga

SEQ ID NO: 1259 - protein, 87 aa, Thermotoga maritima
MYVIMVYDVNEKRVAKILKIARKYLKWVQNSVLEGELSPGKYEKLKLEVSRLIDEKEDSVRFYVMDSQKVFNLETLGVEKGEDGFIF

SEQ ID NO: 1260 - DNA, 960 bp, Thermotoga maritima
atggagagcgtctatctcttttcaagcggaacgttgaaaagaaaagcgaataccatttgcctcgaaacagaatcgggccgaaagtacatacccgttgaaaacgtgatggatataaaggtttttggggaggtagatctcaacaaaagattcctcgagtttctttctcagaaaagaattcctattcactttttcaacagagaggggtattatgtaggcactttttatcccagagagtatttaaacagcggttttctgatactgaaacaggctgaacactacattaaccaagaaaagagaatgctcatagcaagagaaatagtttcaagatcgtttcaaaacatggtcgactttttgaaaaaacgaaaagttcgggctgattcactaacgagatataaaaagaaagcagaagaggcgagcaatgtatcagagttgatgggaatagaaggaaacgcgagagaagagtactactcgatgatagacagtctcgtgtcagatgaaagattccgtatagagaagagaacacgaagacctcccaagaattttgccaacacgcttatcagtttcggaaattcgctcctttatacgactgttttgagcctcatctatcagacacatctggacccgaggataggttatctccatgagacgaacttcagaaggttctcactcaatctcgatatagcagagctattcaaaccagctgtagtggacaggttgtttttgaatctcgtcaacactcgtcagataaacgaaaaacatttcgatgaaatttcagagggtctaatgctcaacgacgagggaaaaagtctgtttgtcaaaaattacgaacaggctttgagggaaacagttttccacaaaaagttgaaccggtacgtttccatgagatctctgataaagatggaacttcataaactggagaagcacctcataggtgaacaggttttcggatccgaggaatga

SEQ ID NO: 1261 - protein, 319 aa, Thermotoga maritima
MESVYLFSSGTLKRKANTICLETESGRKYIPVENVMDIKVFGEVDLNKRFLEFLSQKRIPIHFFNREGYYVGTFYPREYLNSGFLILKQAEHYINQEKRMLIAREIVSRSFQNMVDFLKKRKVRADSLTRYKKKAEEASNVSELMGIEGNAREEYYSMIDSLVSDERFRIEKRTRRPPKNFANTLISFGNSLLYTTVLSLIYQTHLDPRIGYLHETNFRRFSLNLDIAELFKPAVVDRLFLNLVNTRQINEKHFDEISEGLMLNDEGKSLFVKNYEQALRETVFHKKLNRYVSMRSLIKMELHKLEKHLIGEQVFGSEE

SEQ ID NO: 1262 - DNA, 480 bp, Thermotoga maritima
atgatgatttctggatctgttgttttgagctatataaactgcaaaagggaagcatggctgatggcgcatggggttcttccagatcagggaaacatgcacatagagataggaaggttcatccacgaagactacagcgattctgtcatgcttcctggtatgaagatcgataccatgtttgaaagagaaggagtgagagtggttggcgaagtgaaaaaatcatccgcttcaaaaaggggagctgagtaccagctcctttactatctttacaggctcgaggaaaaaggtgtgaaagcgaggggagagatcatagtaccaaaagagaacaaaagaataccggttgagctcacagaagaaaacagagagaaaatcaaaaaggtcctcgaggaagtatcttccctccttgaagaagaaactcctccaccacccaagagaaaaggaatttgccgaaagtgtggttatgaacttttctgtttttcgtga

SEQ ID NO: 1263 - protein, 159 aa, Thermotoga maritima
MMISGSVVLSYINCKREAWLMAHGVLPDQGNMHIEIGRFIHEDYSDSVMLPGMKIDTMFEREGVRVVGEVKKSSASKRGAEYQLLYYLYRLEEKGVKARGEIIVPKENKRIPVELTEENREKIKKVLEEVSSLLEEETPPPPKRKGICRKCGYELFCFS

SEQ ID NO: 1264 - DNA, 2193 bp, Thermotoga maritima
gtggagggtgggagagcagaacatagtgtggatgtgatgaaatctcatcctgacagaagactgattgatcatcttgagggtgttaaaagacgctctctggaaaaattcaggtcgcttgatctttcctgggaagaacttttcggatacgatgaaaatgttctggaagaattcgtttccctgctctctgaatcgcacgatgttggaaagagtacaatctactttcagaagcatttgagcggtgaaagagtcgaaagatctttgagtgcgcacgctcttttctccgcggttgctttctttcacaggtcaaaaaacttgccggacaaactcagaatattcggcttcgaaataataagaagacaccacggagatttcaggaactttctggatatagaaatagatgagaaagtcctggaaaagcagttctcagccattccagaggatttcctgagaagatatgatcttcatgatcttaagctatcagaaacaatagaaaggataaaaagatcgatcagtaagttctctatccttggaaaaaaagacctatctgactactttttgatccacctttttatgtccatactcgtttcttcggatagggaggatgtggttttcaagagcgaaccgcttccctcccttccttcttatgaaaaggagaagattctctcctacagagaaaagcttggcagaaaaaaccagatcgattctctgaggtggaaatttcaggaggaaatcttgagcttcaaacccgaaagaggaaagatatactccataaccgcaccgacgggaataggaaaaactattgcaaatctcctttttgccagccatctcgctgatgaagacacgatcgtaatatacgctcttcccttcataaacataattgagcagaccgtcgataagataaaggaaatatttgaaacagaaagcccattcttcgtccttccctttcatcaccttgcaaatccagcttatgaggaacctgataaatacgaagatctcctgatgaacctctggcactccagggtggtagtcacaacattcgtgtcgcttctggagtctctcatcactttcagaaagattccgttcttctacaaattcccaaaagctgttctcatacttgatgaggtccaggcaatacctcacgaatactggacccctgttgaaaaaaccgttgaattcctctcgaaaatgggcaccaccgttttgctctccacagcgacaaagcccgctcttttgaaagaggctctggaagtggtgtctaacaagaatgtttatttcacagccttgaacagaactgttctgaaagtagaaaaagaaatgagctttgaagaatacaaggaattcgtaagagagaccttgaaggatggaaaaagaacgctcatcataacaaacacgataagagaagccgaggagatatacgacgttgttgaaggcatgggaaaaacctgtttcctttcctccagggtgataccaaagcacagactggagatcgtttcgaagataaatgagtacgatctgtgtgtctccactcaggtggtggaagcaggtgttgatatctcattcgagagggtgataagagacatagcacctgttgacagtattgttcaggcagcggggaggtgcaacaggcacttcgagttggaaaagggagaagtgatagtcgtacccgtcaggaatgagagaaaaaacaccctcttttcctcatatgtttacgggagctttctcacagaaacttccatgaacgtgttgaaaaaccacaaatttctggaggaaagcgagtttttcatgctcgtggaggatttcttcagctacgtgaaaacgtacggcaatccggacaagaaaggaatcggcaaggcgctcgagaatttgaatttcaaaaaaataggagaattcagtctcattgaaccagagccaacggtgccgttcatcgttcttgttgatgaagaggctcaaagagtattcgaagaatttgcagagatcttcagtgggaaaagatcaagagaaaacttctctctcgtgaaaagtttgttcagggaactttccccctacatcgtgagcgcgaggataaagagggatcttccattcccacacacgattgccggcatgatggttattcacaggaacgttctcgacaaatggtaccaccccgtgaaaggtttgagagtggaaggatccgatgaggtgatcatcatatga

SEQ ID NO: 1265 - protein, 730 aa, Thermotoga maritima
MEGGRAEHSVDVMKSHPDRRLIDHLEGVKRRSLEKFRSLDLSWEELFGYDENVLEEFVSLLSESHDVGKSTIYFQKHLSGERVERSLSAHALFSAVAFFHRSKNLPDKLRIFGFEIIRRHHGDFRNFLDIEIDEKVLEKQFSAIPEDFLRRYDLHDLKLSETIERIKRSISKFSILGKKDLSDYFLIHLFMSILVSSDREDVVFKSEPLPSLPSYEKEKILSYREKLGRKNQIDSLRWKFQEEILSFKPERGKIYSITAPTGIGKTIANLLFASHLADEDTIVIYALPFINIIEQTVDKIKEIFETESPFFVLPFHHLANPAYEEPDKYEDLLMNLWHSRVVVTTFVSLLESLITFRKIPFFYKFPKAVLILDEVQAIPHEYWTPVEKTVEFLSKMGTTVLLSTATKPALLKEALEVVSNKNVYFTALNRTVLKVEKEMSFEEYKEFVRETLKDGKRTLIITNTIREAEEIYDVVEGMGKTCFLSSRVIPKHRLEIVSKINEYDLCVSTQVVEAGVDISFERVIRDIAPVDSIVQAAGRCNRHFELEKGEVIVVPVRNERKNTLFSSYVYGSFLTETSMNVLKNHKFLEESEFFMLVEDFFSYVKTYGNPDKKGIGKALENLNFKKIGEFSLIEPEPTVPFIVLVDEEAQRVFEEFAEIFSGKRSRENFSLVKSLFRELSPYIVSARIKRDLPFPHTIAGMMVIHRNVLDKWYHPVKGLRVEGSDEVIII

SEQ ID NO: 1266 - DNA, 663 bp, Thermotoga maritima
atgaaagttctggtctttgatgtttctgctccctacgctctcttcagaagaccttacacaacgacatcatcgtacacccttccctttccaccaagaaccactcttttggggcttgtggggtgtgttctgggatattccacacccgaaagactcgacagtgcaaaagtggcggttcagataaaaaatcctttgaagtttctgcgaacgggaacgaactttgtggaaacaaagaaagacaaaaaagcttcaaaaagaacaagaataagtcttcaacttctgaagaatcctgcttacagggtgtttttcagctgggaagacgaagattttgagaggttgaagaaccttctcgaacacagcgaaaccatcttcacaccttaccttggtgtggcaagctttattgccagactgaattacgtgggaaagtacgaagcaacccgtgtagcagattttccctgcgaggtccacacggttgttccgaacacagtaaagcttttgccggagccttcacactatctcatattcgagagggtcacaagaaaaatggacaaagagcgaaacatgcttgaatctgcggtttacattttcaagagggacttatctcctgtgaaggtggaagggggagaagtgtggagggtgggagagcagaacatagtgtggatgtga

SEQ ID NO: 1267 - protein, 220 aa, Thermotoga maritima
MKVLVFDVSAPYALFRRPYTTTSSYTLPFPPRTTLLGLVGCVLGYSTPERLDSAKVAVQIKNPLKFLRTGTNFVETKKDKKASKRTRISLQLLKNPAYRVFFSWEDEDFERLKNLLEHSETIFTPYLGVASFIARLNYVGKYEATRVADFPCEVHTVVPNTVKLLPEPSHYLIFERVTRKMDKERNMLESAVYIFKRDLSPVKVEGGEVWRVGEQNIVWM

SEQ ID NO: 1268 - DNA, 900 bp, Thermotoga maritima
atgaatccagtgaagaacaggagtgaagtgcttttcatctacgatgtgaagtgggcaaatccgaacggtgatccactcgatgagaacagaccgcgctttgatgaagaaacatccagactctttgtcacagacgtgagactcaaaagaactgtgagggattatcttgcggagtgctacgacgaaacgctctgggtgaccggtgaagcggtggtaccggaagacagagtcaaagagcttggaatcaaggacgtaaacgacgcatgccagaagtgcatcgatatcagactcttcggtgccgttattcctcagtcgaaaaaaggagctatggaatcttccataactggtcctgttcagttcagatacggaacgagtcttcacagagtcaaactcatgactatccagggaactgctgcgttcgcaaccgagaattcaaaacagaggagttttcgtgaggatcaggttgtaccctatgccctcatagcattctacggtgtgataaatcagaattctgcaaagtttacaggactcaccgaagaagatgtttccaagcttcttgaaggaatctggatgggtacgaagaacctcatcacaagatcgaaaatggagcacaatcccagactcctgatgagagttgtttacaaggaaggtgtgaactaccactccggagaactcgattaccttgtgaaggtcgtgtccgagaaagaagatgaagaaataagagacatctccgagttgaaactcgacgttaccgaactcaagcaggttctggaatcccttaaggacaagatcgaaagaatagaatactctgttgacaaccgcttaaaactcgcggagaacggagaagagaagccttttgaggagatattcggaggtttccagcttgtaaaactggagtggtga

SEQ ID NO: 1269 - protein, 299 aa, Thermotoga maritima
MNPVKNRSEVLFIYDVKWANPNGDPLDENRPRFDEETSRLFVTDVRLKRTVRDYLAECYDETLWVTGEAVVPEDRVKELGIKDVNDACQKCIDIRLFGAVIPQSKKGAMESSITGPVQFRYGTSLHRVKLMTIQGTAAFATENSKQRSFREDQVVPYALIAFYGVINQNSAKFTGLTEEDVSKLLEGIWMGTKNLITRSKMEHNPRLLMRVVYKEGVNYHSGELDYLVKVVSEKEDEEIRDISELKLDVTELKQVLESLKDKIERIEYSVDNRLKLAENGEEKPFEEIFGGFQLVKLEW

SEQ ID NO: 1270 - DNA, 1641 bp, Thermotoga maritima
gtgcttgaaaagatatacaatcttgggaaaattggtggtgattctttttcaaacttcgctgaagaagttccttctgatgaaggaatagctatctttcttgagagtaattcagagggtttggttttcaaggatgttgtttctatcgagaaaaaaccagggggtaagaactcgaaaatcttcctctacagaaaacagcgcgggaatttctcctcttctgtttcccccaccatgaaatttctcgacaaatctagtggttcaagagaccctctggaaaggacctttgatgtcttcttaggctttttcgaccatccgaagatatctcacatcaaagatgtcctcgagagaaataaagaagagattattgacaagctaagaaattacgatgtaaaaaacagattcctcacgatatccatcgatggaaaatttcccgcagaagttccagaaattctccaggcgtttgaagataaagtcacacagaagaaaactaagggagaggcaaaatgttttctgtgtggaaaagaagcaaattccagactgagtgatgtgttcaaatttgccacctttgacaagcctggcttcacaccttttctttccaagaaacatccgatccagatttgtgatgattgcaggagtgttctggaaaaagccagaagagcaattgatgaaaagctttctttttccttcttcagcaacaacagaattctctggataatcccctccgtacccgatcaggatattctggaatcagtgattgaaaaaatatatgaaataaaagacaccgacaaaaactcaaagtttcgcagtttcgctaggctcgaagaagagattgaaaaagttctttcggaaaacgaaagagctgtttacgattttgtactgatagaaaaagaacaacaggcagaaagaatagttcttcacgttgaggaagtctcgcctaccagagtaagacggatccttgaagaatcaaagaagatagaatctcaactcaaagaagacggtttcaaagtttctgtgaacttctcagtgattcacaaattcttcgaggatctggacagatacttcaactccctgtttagtgctgtattctctgagggaacgtttgataaaaaactgctgctgactctctttctttcgaaaataagaagcgatttctttggaaatgatactttactttctgcacgtgaagcttttgccacgtatgtttatctgagacgcttgaacgtcttaaaggggggtgcttccgttttgaagggtgaagatttcttctccaggtatccggagtttttcgatgaaccgtggaagaaagcagtctttttagaaggagttctggcaaattaccttctttatctgcagtacgttaaaagaaactcgaaggctttcacgaagaaactgaaaggactcagactgacaaagagagatgtggaggggcttcttccggaaatcagagccaagatcgaagcctacggtggaatgagtgaaagtgtggcagagcttttcagggagactgctgaagctttcctcgaagctgggaactggtcagcatcacccgacgagatcagttttgtcttcgtctcgggactttctctcgggaaaactttcttcagggaggtaggggtcgatgaatccagtgaagaacaggagtga

SEQ ID NO: 1271 - protein, 546 aa, Thermotoga maritima
MLEKIYNLGKIGGDSFSNFAEEVPSDEGIAIFLESNSEGLVFKDVVSIEKKPGGKNSKIFLYRKQRGNFSSSVSPTMKFLDKSSGSRDPLERTFDVFLGFFDHPKISHIKDVLERNKEEIIDKLRNYDVKNRFLTISIDGKFPAEVPEILQAFEDKVTQKKTKGEAKCFLCGKEANSRLSDVFKFATFDKPGFTPFLSKKHPIQICDDCRSVLEKARRAIDEKLSFSFFSNNRILWIIPSVPDQDILESVIEKIYEIKDTDKNSKFRSFARLEEEIEKVLSENERAVYDFVLIEKEQQAERIVLHVEEVSPTRVRRILEESKKIESQLKEDGFKVSVNFSVIHKFFEDLDRYFNSLFSAVFSEGTFDKKLLLTLFLSKIRSDFFGNDTLLSAREAFATYVYLRRLNVLKGGASVLKGEDFFSRYPEFFDEPWKKAVFLEGVLANYLLYLQYVKRNSKAFTKKLKGLRLTKRDVEGLLPEIRAKIEAYGGMSESVAELFRETAEAFLEAGNWSASPDEISFVFVSGLSLGKTFFREVGVDESSEEQE

SEQ ID NO: 1272 - DNA, 30 bp, Thermotoga sp
gtttcaatagttccttagaggtatggaaac

SEQ ID NO: 1273 - DNA, 1221 bp, Thermotoga sp
ttgatactcattgtttttcaaaaaattctggcaaaaacccctatctggacaggaaatatcgattcaaaaagtgatgctattcagccaaccggaataatgggttccctccgatggtggacagaagcacttcttagaggaatggaagaatttgcatgtgttcctaccagcaattcgaggtgtcctgatgatgggaattattgcccttcctgtttgatttttggtgctacgggaagaaggagattgttcagacttgaaataaatggaggagagagaatctcctttcgtagaataaacataaaaccttcgaatcgatcacgtggttggttttttggacctggtgttgcaggaaatttagagttgaaaatgatttctctcgatgggaaattcgatgaagttctcgtattaacaccattgattatcgcttcaaagtggggaggaattggagcaaaaacacaacttggatatggagttgttgaagtaacaaatcctccagatatcagtttcgagaatttcaaaaaagttcttgagaatctttcacagaaaggaaaacgccagagatcaaatgaacctgattttccagacctcagagaaatgttttttgcaaaagtcagatttaaagtgaataaaagtagttggtggaaagaaatagatggaataactgaagaagaaaccaaacaggcaatggaggtatgtattcgcaacgattttctacccatagcacctgtgatcaaaaactggttgagatacggtaatggaagccgaatttggaggtccaatcaaaatgtaaaaggtttggaaaactggctgtttggaaccagcaaaaaagtgtgtccaaaatgttacagcgcaaaaattgacaaagagagtaatgaaacctacaaatgtcgggactgtggtcaaaaattcggagctggggaaatcatcaatagatgtgcttcaaagataaacatctcctgtgcttataaaatcagtgatgatctttgggaaatcaggatctggggatggataccgcagagtacattttatggatttcagagggagtcatttttgaaaaatctcaaagatgcattgagtagcagagaattttacacgcttttgggtaatcaaacatcagatcacagacttgatgtatggcgagaatatgcctcaaatagagacactattaaggaagagcgaaatttcgatgatttcattgaaagtttgttgagggaggataaatga

SEQ ID NO: 1274 - protein, 406 aa, Thermotoga sp
MILIVFQKILAKTPIWTGNIDSKSDAIQPTGIMGSLRWWTEALLRGMEEFACVPTSNSRCPDDGNYCPSCLIFGATGRRRLFRLEINGGERISFRRINIKPSNRSRGWFFGPGVAGNLELKMISLDGKFDEVLVLTPLIIASKWGGIGAKTQLGYGVVEVTNPPDISFENFKKVLENLSQKGKRQRSNEPDFPDLREMFFAKVRFKVNKSSWWKEIDGITEEETKQAMEVCIRNDFLPIAPVIKNWLRYGNGSRIWRSNQNVKGLENWLFGTSKKVCPKCYSAKIDKESNETYKCRDCGQKFGAGEIINRCASKINISCAYKISDDLWEIRIWGWIPQSTFYGFQRESFLKNLKDALSSREFYTLLGNQTSDHRLDVWREYASNRDTIKEERNFDDFIESLLREDK

SEQ ID NO: 1275 - DNA, 1101 bp, Thermotoga sp
atgatgtatcatgatttctatgcctactatcagattgaaaatgagcaaagtatcgaccaactcataaatggttctggaaaatacaacgatattttagacacgtatcagaagattttacttctttccaccgcttactccaaaggtaaaggcgtcatcgactatgcgaaatctggaaatagacgtaatagagctggattaatagcgattttgcattctcaaaagaaatatgatcagtacattcatggcaaactgaatgaaataaaatcacttggaatagattcaagtatagacatcacccttttaccaaaaggaagctggatccttgaatttcagttggagctggagaaaccttttctgtcgaaagacgatataccgttttatatcatcgaaaatcctgtaaaaaaagatgtagtttttggagtaccctacacacctgctactacctggaaagggaatcttagatgggcaatgatgaaagagtttttagaaaagaaaaaagacgatccagaagaatttgcagaaacgagatttcgtcatacgctgcttttcggaacggaaaagggatgggaaggaacaccgaaaggatggtcggagtatctggacagaatgtgcccagacgcgaagagaatttatagaaagaaactaacagagatgtttgaaaaaaacaacgacaagccagaagatatacacgtcgaaggaatgcttcacttctaccctaccttctgggacaggatcgacctgatggtcataaacccacacgacagaaagacaaagacaggtaaaaatcctatctatttcgaaatcgttcccgagggagcaaaagggatgttcaggttactttatgtcccctattattggcttggagacgatgatgaaaaactgaaaaagaaggtctgggaagatctgagccaggtcatagccggtgtcaaggccatgatgctcaagtatggattttctgcaaagaagacgatcggttttggaaaagcaagaaataacttcaacactggcagggtggagataaaaggatttttatctacccgggaattttcaaattttgaaggattggagagtatttggggtgtggaagatgagtattcttga

SEQ ID NO: 1276 - protein, 366 aa, Thermotoga sp
MMYHDFYAYYQIENEQSIDQLINGSGKYNDILDTYQKILLLSTAYSKGKGVIDYAKSGNRRNRAGLIAILHSQKKYDQYIHGKLNEIKSLGIDSSIDITLLPKGSWILEFQLELEKPFLSKDDIPFYIIENPVKKDVVFGVPYTPATTWKGNLRWAMMKEFLEKKKDDPEEFAETRFRHTLLFGTEKGWEGTPKGWSEYLDRMCPDAKRIYRKKLTEMFEKNNDKPEDIHVEGMLHFYPTFWDRIDLMVINPHDRKTKTGKNPIYFEIVPEGAKGMFRLLYVPYYWLGDDDEKLKKKVWEDLSQVIAGVKAMMLKYGFSAKKTIGFGKARNNFNTGRVEIKGFLSTREFSNFEGLESIWGVEDEYS

SEQ ID NO: 1277 - DNA, 2985 bp, Thermotoga sp
gtgtggaagatgagtattcttgaaacgttaaaggagaacagaactccgatattgctcgctgaaataggagcgtatttgcatctggtgggaagattttccaaggagtttttggagacacatgtgagagattctgatcttcaatttgattatcagaaaatctgttcaaattccgatttttttgaaaacacaaggttatacgaaatgctcaccaataaaaaattaaaagatttcataagcaagttgaacacaagtgcagctgttgaagaattaaaaaaggacattgataatttctgcaattttattcagaaacacacctggagagatgctccaaaaggactttgtaaaatattggcagatgctcatggaatcgtatctggtatagacaaatcgttggctggcagaatagtggaagcaggaaaacagagaaaaaactatatatttcgctccacagcttttggttacgaaaaagaaatagaattattgaaagatcggggtttaaagaagcaattctttgaagaactttctcagattttaaacaacattttcacggaactcgagacgaaagaacagatttcctatgagagttatcaaagatttctttcgatcatcacaaaatattactcaaaaaccattggagaaacaaggagatccatcaatgaaatttctctctacgattacgcttactcaattgcatctctggtgaaatctaaccttgccaaaatgcttgtagatggttggtatgaaccaagaagtaaatctaaatggacgatattatcggtaaatctggatatccccagattgctttccaaaggtttgaaaataggagatattttaggataccgggaagaaaccgaacaacttttcaatgaaatcaagaagttcgttgagtatgactatccgtttggtaatgaaatttacagagatgaaacaggtatttacttttccagcccatctttcgaggaaataaaaaaatttttagaggaaatcgagaagactttcttcaatcacctcagtttcgatgttagtcttcatattgatacctcaagagagagcagaagcatgactgttattgccagtgaaagaatgaatgctctgaaaaaaatttcctttccacatattagtggtatgatgaaacatcagagaaatgctgcaatcaataacaatcaagagaataagttttctttcgaaaaatgcccagtttgtggtgtcagaatgaaatcggagaaaaatgatagatgtgaagtgtgtgataagcgatacaagaagagagcagagtcttggaataaagatccaaaaaagaccgtatggttagatgaagtatcagacaaaaatggctgtgttgctatgatcgttggaaaatttaatttaaataaatggctttctggggaattgttggacaccttaatttcgacaacctttgaggaatggaaaagcgaaaacggaaatattcagttgtgttcgaagctcggaatccacaaaatagaggatttagaaagaaaatttcaagatatgttcaaaaattctaaactagaccaaactggaaaggaactttgcgaatcgcttgttggtataaaaattgatgatttcagcaagctctggaattctctcgctgaaagggatgctactgggtatgctttaaatcttgtgaatgaagaagaaaaagcaagacatctcatcaagctactctttagaaaacatccttcgtttgcccgtttaaggcgtatttggtcgacaactaaagagtttattgatcaaactattctcgaaacaataataaattcttttataccttcaaacccaagaacaaagcgaatccagcttgtaatttctccaaatccatccattccaaagaatgcaacatgcgacataattgtaggcggtgtaagattcagtcctgtttgcattgataatacaaagggtatttttataagcacaacaaatcttgagattttaagtaaattcggaagaactgtcgaggaaatagcagaagcactttccgggcaaaatataaaactgaaaacagaagaagagaaaaattggaaagattacatgatcattgaagcaaagccagctgatgatgaattccaagattatatcccttatatagagatttacgatttcccagaccagttcatgatacttgttcctgcctatgaagctctcgatatagcagaaaagatcctcatggaatacgaaaaacaattctccaaagtgagagacagattgccattccaccttggagtcattgctttccaccgaagaacacccctttatatcgtgatggatgctgcaaggaggctgttgaaaagattcgaaatgtcgaaaacaatagaagctgatgtgataaaagtggaagatatcgctggagactcagaattgggaaaatgtaaaaaactcgtattgcaggttgatagaagggaaatccctctaaactgggttgtctcttactctacaaaagatccagaagtggaagatctctggtatccatatttaagaatttgcagtgcagaaaaaccagacaggactctctgctttgattatacaggcagcggagattatgttgttcatataaaggagataaaggaaaaagacagaataaagatagagccctcctacttcaaactctgctacatagaagaatcttcagatagattcaatgtagatgaaaatttgaagtttatagatgatatacatcatatcaagaacttatgggaaatggtgaaacgaaatctgttatcgaaaaaatggactctttcgcagttgtattcattctggaaagaacttgagagaataaaagagtacgacgaagaaacctttgagtattttctggaatcaaacctcatcaacatacttggtcttaatccttcttcagatgaattcgaatttttaaaaaaagcaattgaagatggactttttgaattgtgtcttcactggaatcttcaggttagaaaggagaaagcggaaaagggggctgattcaatatga

SEQ ID NO: 1278 - protein, 994 aa, Thermotoga sp
MWKMSILETLKENRTPILLAEIGAYLHLVGRFSKEFLETHVRDSDLQFDYQKICSNSDFFENTRLYEMLTNKKLKDFISKLNTSAAVEELKKDIDNFCNFIQKHTWRDAPKGLCKILADAHGIVSGIDKSLAGRIVEAGKQRKNYIFRSTAFGYEKEIELLKDRGLKKQFFEELSQILNNIFTELETKEQISYESYQRFLSIITKYYSKTIGETRRSINEISLYDYAYSIASLVKSNLAKMLVDGWYEPRSKSKWTILSVNLDIPRLLSKGLKIGDILGYREETEQLFNEIKKFVEYDYPFGNEIYRDETGIYFSSPSFEEIKKFLEEIEKTFFNHLSFDVSLHIDTSRESRSMTVIASERMNALKKISFPHISGMMKHQRNAAINNNQENKFSFEKCPVCGVRMKSEKNDRCEVCDKRYKKRAESWNKDPKKTVWLDEVSDKNGCVAMIVGKFNLNKWLSGELLDTLISTTFEEWKSENGNIQLCSKLGIHKIEDLERKFQDMFKNSKLDQTGKELCESLVGIKIDDFSKLWNSLAERDATGYALNLVNEEEKARHLIKLLFRKHPSFARLRRIWSTTKEFIDQTILETIINSFIPSNPRTKRIQLVISPNPSIPKNATCDIIVGGVRFSPVCIDNTKGIFISTTNLEILSKFGRTVEEIAEALSGQNIKLKTEEEKNWKDYMIIEAKPADDEFQDYIPYIEIYDFPDQFMILVPAYEALDIAEKILMEYEKQFSKVRDRLPFHLGVIAFHRRTPLYIVMDAARRLLKRFEMSKTIEADVIKVEDIAGDSELGKCKKLVLQVDRREIPLNWVVSYSTKDPEVEDLWYPYLRICSAEKPDRTLCFDYTGSGDYVVHIKEIKEKDRIKIEPSYFKLCYIEESSDRFNVDENLKFIDDIHHIKNLWEMVKRNLLSKKWTLSQLYSFWKELERIKEYDEETFEYFLESNLINILGLNPSSDEFEFLKKAIEDGLFELCLHWNLQVRKEKAEKGADSI

SEQ ID NO: 1279 - DNA, 975 bp, Thermotoga sp
atgaaaccctatgtgaaaccctattatgctatgaccatagacccaatacatgttggaacaggcggaactagactagaaagagtcgatctatccatagttcgagaccctgccacaaagcttccaaaaatcccagggtcaagcataagcgggcctgccagagcttataccgcacttgaaactaaaaaatacagatgggaggaaaatggtcgtgaatattcctgtgcggggagagggggagaaggaggcgaaaagcactgtggaatggtgaatcccgcttgtcctgtctgtgtcccttatggtttctctaagggaactggaaatagtttgcaaggactcgctcaattttttgatgcacacatcctcctttttcctgttgcgtcgatgataggccctgtgtgggtaacttcccctctagcgttggaagcatatgaaattgctgattttttggaagataggttttatcctcttggaaagcaagtagaagcaagagagaacctcaactttggctggatcatgcaggaaaaggcaaaagataaccttgagaaaatagaccaaataaagaaaaaaatacctgaagaaatacctgaatttataaaacaaagagttgtccttgtttcagacactgttttccccaaaatcgtaaatagcaacctcgaagtgagaacatcggtaagtatagatcccgacactggggctgcagaagagaaggcacttttcacctatgaagcgataccacgtggaaccatcctgaaattcgacgtcgtatacaactcaggtgaattttttaaggttggtgacaaggatctaaaactacaggatggaagaaatgttgatatacaatgggtgaaagagcaagtagaagagggattaaaactcttcgaagttcttggaataggtggtatgaacacacgcggtatgggaagagtgagagttttgaatcttgaagaggtgaacaaagatgcaagagaaaattag

SEQ ID NO: 1280 - protein, 324 aa, Thermotoga sp
MKPYVKPYYAMTIDPIHVGTGGTRLERVDLSIVRDPATKLPKIPGSSISGPARAYTALETKKYRWEENGREYSCAGRGGEGGEKHCGMVNPACPVCVPYGFSKGTGNSLQGLAQFFDAHILLFPVASMIGPVWVTSPLALEAYEIADFLEDRFYPLGKQVEARENLNFGWIMQEKAKDNLEKIDQIKKKIPEEIPEFIKQRVVLVSDTVFPKIVNSNLEVRTSVSIDPDTGAAEEKALFTYEAIPRGTILKFDVVYNSGEFFKVGDKDLKLQDGRNVDIQWVKEQVEEGLKLFEVLGIGGMNTRGMGRVRVLNLEEVNKDAREN

SEQ ID NO: 1281 - DNA, 393 bp, Thermotoga sp
atgcaagagaaaattagtaaaaatattgatcaaatctgtgcaaggtacagcatcgatatcgtcaatgagatgaagagcgaatgcgattcaaaggagattcaaagccttgtaactaaggcactgggtgttcttcaacaacaaggtctttatgccttcggactgttctgtaaagcagaaaataaagcagagggaatcctcaaaaaggccatagaaatgctacgtgaaataggtattatgaagaattcaaatgaagaagatctttcgagcataagtaacctctcagagagaatacacgatttgatgttcgcaatcgagatcgttgagaaaaccttgatatacgcaagataccacgctaaggctttggtgaaagaatctagcagtcatagtgagtga

SEQ ID NO: 1282 - protein, 130 aa, Thermotoga sp
MQEKISKNIDQICARYSIDIVNEMKSECDSKEIQSLVTKALGVLQQQGLYAFGLFCKAENKAEGILKKAIEMLREIGIMKNSNEEDLSSISNLSERIHDLMFAIEIVEKTLIYARYHAKALVKESSSHSE

SEQ ID NO: 1283 - DNA, 897 bp, Thermotoga sp
atgaaagaggaaaaatggattctctactctctagttttccagttgaaatcaccattgcatattggataccataaaatcatgcacctcacacggacgagattatatgttcctgcaaggactttatggggcgctatgacggtaaaacttgtgcagaaaacagggagaaatgattataaaaaagctgggcaatttctgagagaaaagatgagattcggatatttctacttttcaaacggcaaagaacttttccttcctcattacaccgaagagggtttgaaactcggtcgaatgtgtctgtacgaatttgagaagaaatatatccgctctatatcaacaaccgccatagatgcaaattctttatctgcggaagaagaaaccctacatcaccttgaatacataaattatcgaaacacagaagattcttcacctctatttctcgaagggttgatgtggataaaaatcgatggtcaccctaaagaagatgactttttattcacatatgaagatgttcaggtaaagctctcagaattattgcagtctctgcaaataggtggtgaaaggaaatatggatttggagaaacagaactggtgaaattggaaagattggatgatacagatctcaggtcaaaaggattttgcggtagctggcttgagagtgatgagtcagtaaaagtgacgatcttgcaagggaatttcatttgggcacatgcgaaatacgagccgaatttgaacatgaaaggcgagatagagatttttatgggaagagaatgggatgacaaaaaaggatccggaaggaacattgtaactcatggtctttgttggatgccgggatccgttgtggaagaacaagcaacgttcgaaataactccttcgggaatatgggaagtatacaaatag

SEQ ID NO: 1284 - protein, 298 aa, Thermotoga sp
MKEEKWILYSLVFQLKSPLHIGYHKIMHLTRTRLYVPARTLWGAMTVKLVQKTGRNDYKKAGQFLREKMRFGYFYFSNGKELFLPHYTEEGLKLGRMCLYEFEKKYIRSISTTAIDANSLSAEEETLHHLEYINYRNTEDSSPLFLEGLMWIKIDGHPKEDDFLFTYEDVQVKLSELLQSLQIGGERKYGFGETELVKLERLDDTDLRSKGFCGSWLESDESVKVTILQGNFIWAHAKYEPNLNMKGEIEIFMGREWDDKKGSGRNIVTHGLCWMPGSVVEEQATFEITPSGIWEVYK

SEQ ID NO: 1285 - DNA, 30 bp, Thermotoga sp; identical to SEQ ID NO: 1272

SEQ ID NO: 1286 - DNA, 1638 bp, Thermotoga sp
gtgctggagaagatatacaatcttgggaaaatcggaatcgaatctctctcagatttcgccgaagaacttcctcttgaagacggactggctatttttctcgaaagtggtccaaatggtttgattttcaaagatattggtcccgttaagaaaagccctggtggaaagagttcgaaggttttcctctacagaaaacagcgcgggaatttctcttcttctgtttcccccaccatgaaattcctcgacgaatctagtgtttcgagagaccctctggaaaggacctttgatgtcttcttaggctttttcgaccatccgaagatatctcacatcaaagatgtccttgagagaaataaagaaaagattattgaaaagctaagaaattacgatttaaaaaacagatttctcacgatatccatcgatggaaaatttcccgcagaagttccagaaattctccgggcgtttgaagataaagtcacacagaagaaaactaagggagaggcgaaatgtttcctgtgtggaaaagaagcaaattccagactgagtgatgtgttcaaatttgccacctttgacaagcctggcttcacaccttttctctccaggaaacacccgatccagatttgtggtgagtgcaggagtgttttggaaaaagccagaagagtaattgatgaaaagctttctttctccttcttcaacaacagaattctctggataattccctccgtgcccaatcaggatattctggaatcagtgattgaaaaaatatctgaaataaaagacaccgacaaaaaatcaaagcttcgcagttttgctagactcgaaagaaaaatagaagatgttctctccgaaaatgagaaagctgtctacgatttcatactgatagaaaaggaacagcaggcggaaagaatagttctgcacatagaggaggtttcacctacaagagtgagacaaatcctcgatgagtcagataaaacagaatctcaactcaaggaagatggcttcgaaatttctgtgaacttctcggtgatacacaaattcttcgaggatctggacagatacttcaactccctgttcagtgctgtgttctctgaggggacgtttgataaaaaactgctgctgactctctttctttcgaaaataagaagcgatttctttggaaatgatactttactttctgcacgtgaggctttcgccacgtacgtttatctgagacgtttgaacgtcttaaaggggggtgcttccgttttgaagggtgaagatttcttctcaaggtatccggagtttttcgatgaaccatggaagaaggcagtcttcttagaaggagttctggcaaattaccttctttacctgcagtacgttaaaagaaactcgaaggctttcacgaagaaactgaaaggactcagactgacaaagagagatgtggaggggcttctcccagaaatcagagccaagatcgaagcctacggtggaatgagtgaaagtgtggcagagcttttcagggaggctactgaagcctttctcgaagctggaaactggtcagcatcgcccgatgagatcagttttgtctttgtttcgggactttccctcgggaaaactttcttcaaggaggtagaggttgatgaatccggtgaaaaacaggagtga

SEQ ID NO: 1287 - protein, 545 aa, Thermotoga sp
MLEKIYNLGKIGIESLSDFAEELPLEDGLAIFLESGPNGLIFKDIGPVKKSPGGKSSKVFLYRKQRGNFSSSVSPTMKFLDESSVSRDPLERTFDVFLGFFDHPKISHIKDVLERNKEKIIEKLRNYDLKNRFLTISIDGKFPAEVPEILRAFEDKVTQKKTKGEAKCFLCGKEANSRLSDVFKFATFDKPGFTPFLSRKHPIQICGECRSVLEKARRVIDEKLSFSFFNNRILWIIPSVPNQDILESVIEKISEIKDTDKKSKLRSFARLERKIEDVLSENEKAVYDFILIEKEQQAERIVLHIEEVSPTRVRQILDESDKTESQLKEDGFEISVNFSVIHKFFEDLDRYFNSLFSAVFSEGTFDKKLLLTLFLSKIRSDFFGNDTLLSAREAFATYVYLRRLNVLKGGASVLKGEDFFSRYPEFFDEPWKKAVFLEGVLANYLLYLQYVKRNSKAFTKKLKGLRLTKRDVEGLLPEIRAKIEAYGGMSESVAELFREATEAFLEAGNWSASPDEISFVFVSGLSLGKTFFKEVEVDESGEKQE

SEQ ID NO: 1288 - DNA, 900 bp, Thermotoga sp
atgaatccggtgaaaaacaggagtgaggtgcttttcatctacgatgtgaaatgggcaaatccaaacggtgatcctctcgatgaaaacagacctcgctttgacgaagaaacttccaggctctttgtcacagatgtgaggctcaaaagaactgtgagggattatcttgcagagtattacaacgaaacgctctgggtaaccggtgaagcggtggtaccggaagaaagagtcaaagagcttgaaatccaggacgtaagcgacgcatgcaagaagtgcatcgatatcaggctcttcggtgccgttattcctcagtcgaaaaaaggagctatggaatcttccataactggtcctgttcagttcagatacggcacaagccttcacagagtcaaactcatgactatccagggaaccgctgcgtttgcaaccaaagattcaaaacagaggagtttccgcgaagatcagctcgtgccatacgccctcatagcattctacggtgttataaatcagaattctgcaaagtttacaggactcaccgaagaagatgtttccaagcttcttgaaggaatctggatgggtacgaagaacctcatcacaagatcgaagatggagcacaatccaagactcctgatgagggttgtttacaaggaaggagtaaattaccactccggagaactcgattaccttgtgaaggtcgtgtccgagaaagaagatgaagaaataagagacgtctccgagttgaaacttgacgttaccgaactcaagcaggttttggaatctcttaaagacaagatcgaaagaatagaatactcggttgacaaccgtttcaagctcgcagagaacaaagaagagaagtctttcgaggagatattcggaggtttccagcttgtgaaactggagtggtga

SEQ ID NO: 1289 - protein, 299 aa, Thermotoga sp
MNPVKNRSEVLFIYDVKWANPNGDPLDENRPRFDEETSRLFVTDVRLKRTVRDYLAEYYNETLWVTGEAVVPEERVKELEIQDVSDACKKCIDIRLFGAVIPQSKKGAMESSITGPVQFRYGTSLHRVKLMTIQGTAAFATKDSKQRSFREDQLVPYALIAFYGVINQNSAKFTGLTEEDVSKLLEGIWMGTKNLITRSKMEHNPRLLMRVVYKEGVNYHSGELDYLVKVVSEKEDEEIRDVSELKLDVTELKQVLESLKDKIERIEYSVDNRFKLAENKEEKSFEEIFGGFQLVKLEW

SEQ ID NO: 1290 - DNA, 663 bp, Thermotoga sp
atgaaagttctggtttttgatgtctccacttcctacgctctctttagaaggccttacacaacgacatcgtcttatacccttccttttccaccaagaaccgctcttttagggcttgtggggtgtgttttgggatattccacacctgaaaaactcgacagtgcaaaagtggcggttcagataaaaaatcctttgaagtttctgcgaacgggaacgaattttgtggaaacaaagaaagacaaaaaagcgtcgaaaagaacaagaataagtcttcaacttctgaagaatcctgcttacagggtgtttttcagctgggaagacaaagattttgagaggttgaaaaatcttctcgaacacaacgaaaccatcttcacaccttaccttggtgtggcaagcttcatagctaaactggattacgtaggagagtacgaagcaactcgcgtagaagattttccctgcgaggtccacacggttgttccgaacaccataaaaatcgtgccagaaccttcacactacctcgtattcgagagggtcacaagaagaatggataaagaaaggaacttgcttgaatctgcggtttacatttttaaaagagacttatctcctgtgaaggtggaagggggagaagtgtggagagtgggagatcagaacgtagtgtggatgtag

SEQ ID NO: 1291 - protein, 220 aa, Thermotoga sp
MKVLVFDVSTSYALFRRPYTTTSSYTLPFPPRTALLGLVGCVLGYSTPEKLDSAKVAVQIKNPLKFLRTGTNFVETKKDKKASKRTRISLQLLKNPAYRVFFSWEDKDFERLKNLLEHNETIFTPYLGVASFIAKLDYVGEYEATRVEDFPCEVHTVVPNTIKIVPEPSHYLVFERVTRRMDKERNLLESAVYIFKRDLSPVKVEGGEVWRVGDQNVVWM

SEQ ID NO: 1292 - DNA, 2166 bp, Thermotoga sp
gtggatgtagtgaagtctcatcctgacagaagactgatcgaccatctcgaaggtgttaaaaaacgctctatggagaaattcagatcacttgatctttcctgggaagaacttttcggatacgatgaaagaattctggaagaattcgtttctctactctctgaatcgcacgatattggaaagagtacaacctactttcaaaagcatctgaacggtgagagagttgaaagatctttgagtgcgcacgctttctcctctgcggttgctttcttccacagatcaaaaaacttgccggacaaactcagaatattcggttttgagataataagaagacaccacggagatttcaggaactttctggatatagaaatcgacgaaaaagttctggaaaaacatttctcagccattccagaagatttcctgagaagatatgaccttcatgatttgaaactgtcagaaacgatgaaagagatgaaaaaattgatcagtaagttttctatccttggaaaaaaagagctttctgattactttttgatccatctttttatgtccgtacttgtttcttcggatagggaggatgtggttttcaaagacgagccgcttccttctcttccttcttatgaaaaggagaagatactctcctacagagagaatctcggcagaaagaatcagatcgactctctgagatggagatttcaggacgagatcttgaacttcaaacccgaaagaggaaggatatactccataactgcaccgacgggaataggaaaaactcttgcaaatctcctttttgctggacatctcgctgatgaagacacgatcataatatacgcacttcccttcataaacataattgagcagaccgtcgataagataaaggaaatatttgagacagaggatccgttctttgtccttccttttcatcacctcgcaaatccagtttacgaagaagctgacaaatatgaagatcttctaatgaatctctggcactccagggtgatagtcacaacattcgtgtcgcttctggagtccctcatcactttcagaaagattccgttcttctacaaatttcctaaagccgtcctcatactcgatgaggttcaggcaatacctcacgaatactggacccctgttgaaaaaaccgttgaatttctttcgaaaatgggcaccaccgttttactctctacagcgacaaagcccgctcttttgaaagaagctcaggaggtggtgtctaacaagaatgtttatttcacagccttgaacagaactgttctgaaagtggaaaaagagatgagctttgaagaatacaaagaattcgtaatagagaccttgaaagatggtaaaagaacgctcatcataacaaatacgataagagaagccgaggagatatacgacgctgttgaaagcatgggaaaaacgtgttttctttcctccagggtgataccaaagcacagactggagattgtttcgaagataaatgagtacgatctgtgcgtctccactcaggtggtggaagcaggtgttgatatctcgtttgaaagggtgataagagacatcgcacctgttgacagtatcgttcaggcagcgggaaggtgcaacagacacttcgagttggaaaagggagaagtgatagttgtacctgtcaaggatgagagaaaaaacaccctcttttcttcttacgtttacggaagtttcctcacagagacttccatgaacgtattgaagaactacaaagttctggaagaaagtgaatttttcacgctcgtggaggatttcttcgactatgtgaaaatgtacggcaatccggataagaaaggaatcggcaaagcgctcgagaatttgaatttcaaaaaaataggagaattcagtcttattgaaccagaaccaacggtaccgttcatcgttcttattgatgaagaggctcaaagagtattcgaagaatttgcagagatcttcgatgggaaaaagtcaagagaaaacttctctctcgtgaagaggttgttcagagaactttctccctacatcgtgagcgcgaggataaagaaggatctttcattcccacacacgatcgccggcatggtggttatctacagaaacgttctcgacaagtggtaccatcctgtgaagggtttgagagtggaaggatccgatgaggtgatcatcatatga

SEQ ID NO: 1293 - protein, 721 aa, Thermotoga sp
MDVVKSHPDRRLIDHLEGVKKRSMEKFRSLDLSWEELFGYDERILEEFVSLLSESHDIGKSTTYFQKHLNGERVERSLSAHAFSSAVAFFHRSKNLPDKLRIFGFEIIRRHHGDFRNFLDIEIDEKVLEKHFSAIPEDFLRRYDLHDLKLSETMKEMKKLISKFSILGKKELSDYFLIHLFMSVLVSSDREDVVFKDEPLPSLPSYEKEKILSYRENLGRKNQIDSLRWRFQDEILNFKPERGRIYSITAPTGIGKTLANLLFAGHLADEDTIIIYALPFINIIEQTVDKIKEIFETEDPFFVLPFHHLANPVYEEADKYEDLLMNLWHSRVIVTTFVSLLESLITFRKIPFFYKFPKAVLILDEVQAIPHEYWTPVEKTVEFLSKMGTTVLLSTATKPALLKEAQEVVSNKNVYFTALNRTVLKVEKEMSFEEYKEFVIETLKDGKRTLIITNTIREAEEIYDAVESMGKTCFLSSRVIPKHRLEIVSKINEYDLCVSTQVVEAGVDISFERVIRDIAPVDSIVQAAGRCNRHFELEKGEVIVVPVKDERKNTLFSSYVYGSFLTETSMNVLKNYKVLEESEFFTLVEDFFDYVKMYGNPDKKGIGKALENLNFKKIGEFSLIEPEPTVPFIVLIDEEAQRVFEEFAEIFDGKKSRENFSLVKRLFRELSPYIVSARIKKDLSFPHTIAGMVVIYRNVLDKWYHPVKGLRVEGSDEVIII

SEQ ID NO: 1294 - DNA, 480 bp, Thermotoga sp
atgatgatctctggagctgttgttttgagttacataaattgcaaaagagaagcgtggttgatggcacatggagtgcttccagatcagggaaacatgcacatagagataggaaggttcattcatgaagattacaacgactctatcgtgcttcctggtatgaagatcgacaccatattcgaaagagaaggagtgaaagtaattggtgaagtgaaaaaatcatccgcttcgaaaaagggagctgagtatcaactcctttactacctttacaggctcgaagaaaaaggtgtgaaggcaaagggagagatcatagtaccaaaagagaaccaaagaattccagttgagctcacagaggaaaacagagagaaaattaaaaaggttctcgaggaagtatcttcccttcttgaagaagaaactcctccaccagccaagagaaagggaatttgtagaaagtgcggttatgaacttttctgtttttcgtga

SEQ ID NO: 1295 - protein, 159 aa, Thermotoga sp
MMISGAVVLSYINCKREAWLMAHGVLPDQGNMHIEIGRFIHEDYNDSIVLPGMKIDTIFEREGVKVIGEVKKSSASKKGAEYQLLYYLYRLEEKGVKAKGEIIVPKENQRIPVELTEENREKIKKVLEEVSSLLEEETPPPAKRKGICRKCGYELFCFS

SEQ ID NO: 1296 - DNA, 960 bp, Thermotoga sp
atggagagtgtttatctattttcaagcggaacgttaaagagaaaagcgaatactatctgtcttgaatcagaggcgggaagaaagtacatacctgtcgaaaatgtgatggatataaaggtttttggggaggttgatctcaacaaaagattccttgagtttctttctcagaaaagaattcctattcacttcttcaacagagaggggtattatgtaggcactttttatcccagagagtatttaaacagcggttttctgatactgaaacaggcagaacactacatcaaccaagaaaagagaatgctcatagcaagagaaatagtttcaagatcgattcaaaacatgatcgactttttgaaaaaacgaaaagtccaggctgattcactaacgaggtataaaaagaaagcagaagaggcgagcaatgtatcagagttgatgggaatagaaggaaacgcaagagaagggtactactcgattatggacaatctcgtgtcggatgaaagattccgcatagagaagagaacaagaagaccccctaaaaacttcgccaatacactcatcagttttggaaactcgcttctttacaccaccgttttgagtctcatctatcaaacacatctggacccgaggataggatatctccatgagacgaatttcagaaggttctcactcaatcttgatatagcagagctgttcaaaccagccgtggtggataggttgtttttgaatctcgtcaacactcgtcaaataaacgaaaggcatttcgatgaaatctcagagggtctcatgctcaacgatcagggaaaaagtctgtttatcaaaaattacgaacaaattttgagggaaacggtttttcacaaaaagttgaatcggtacgtttccatgagatctctgataaagatggaacttcataaactggagaagcacctcataggtgaacaggttttcggatctgaggaatga

SEQ ID NO: 1297 - protein, 319 aa, Thermotoga sp
MESVYLFSSGTLKRKANTICLESEAGRKYIPVENVMDIKVFGEVDLNKRFLEFLSQKRIPIHFFNREGYYVGTFYPREYLNSGFLILKQAEHYINQEKRMLIAREIVSRSIQNMIDFLKKRKVQADSLTRYKKKAEEASNVSELMGIEGNAREGYYSIMDNLVSDERFRIEKRTRRPPKNFANTLISFGNSLLYTTVLSLIYQTHLDPRIGYLHETNFRRFSLNLDIAELFKPAVVDRLFLNLVNTRQINERHFDEISEGLMLNDQGKSLFIKNYEQILRETVFHKKLNRYVSMRSLIKMELHKLEKHLIGEQVFGSEE

SEQ ID NO: 1298 - DNA, 264 bp, Thermotoga sp
atgtacgtcatcatggtttacgatgtgaacgaaaagagagttgtcaagattttgaaaatagctcgaaaatacctcaaatgggttcagaactctgttctggaaggagatctttcccccggaaaatatgaaaaactgaaaatggagatctcaagacggatagacgaaaaagaagactccgttagattttacgttatggactctcaaaaggtgttcaacctggaaatactgggagtggagaaaggagaagatggcttcatcttctga

SEQ ID NO: 1299 - protein, 87 aa, Thermotoga sp
MYVIMVYDVNEKRVVKILKIARKYLKWVQNSVLEGDLSPGKYEKLKMEISRRIDEKEDSVRFYVMDSQKVFNLEILGVEKGEDGFIF

SEQ ID NO: 1300 - DNA, 1278 bp, Thermotoga sp
ttggagatcaaatgtaaggttgtaactcctatgttttcaagaggcgcggctgagccgaagtgggagaacggaaacagagtatatcccttcgagctgaggccgcaaagcatcaaaggggtcctcagattctggtttcgtgctatcgctccaacggtgatagacatctactcgctcgagggtttggaaaatctcagtaagaaagaaaaagagagatgggaaaaagagaaatacaagggcttgaaatatctcgaaggactgatcttcggatctcaggaaagaaaatctccttttagtttggaggtcgaggtgaaaggggaatcgcaggctttgggaagttttgaaaaaagggggaggaaccataggattcaaatcgaaaatggccaacttcgccctcttaaatactttctctatggtttgtatgacgaaaagaatgctgtgagctatgaatttctccctcccgatagcgaattcagaatatttatctatacagcaaataagaatattgaagaaataattctgagcttgtttaaactcgtttccactttttccggttttggggcgaagacgaggaaaggttttggggagtttttaatattagagccgtcttttgatagaaataactataaagatgcaattgaaggatgccagaaagcgattgagaaatttatgaaaatacataattctagaagcgacattaaattcaaaccgagccaaaataccttcgcagagataccagaatttcctaatttttgtgactacaacatctttgagttttcaataagagactgtcgattttggagtgatgcgttgaaaaaattttcctatacttacagaaatttaaagagaattcttaggaaatccaaaggggattgtgtaaaagagatcgtagatgctttgaggggaattaaaagagaggtgattcttcctcctgcggttatgggactccctcttttgtatcagagattgaaaggtttcgaggacaagagagtggcaatattctcttctcttcaaaaccttgatcttgaggaaaagagaggtagaaaaccatcccctcttttcatttcccttcacgaagatggtggaaattggaaggtagcagttctcgtaatgagaagcagaataacatctaacgaagaaggaaaactggaaacaatactttttgaagacgaagggaaggaaaaagaatcgttgtttattgtgagaatgaatgaaagagaaagttatgaggaactttataaatgtcttaggaaacaatctaaagaaatccaggggggatga

SEQ ID NO: 1301 - protein, 425 aa, Thermotoga sp
MEIKCKVVTPMFSRGAAEPKWENGNRVYPFELRPQSIKGVLRFWFRAIAPTVIDIYSLEGLENLSKKEKERWEKEKYKGLKYLEGLIFGSQERKSPFSLEVEVKGESQALGSFEKRGRNHRIQIENGQLRPLKYFLYGLYDEKNAVSYEFLPPDSEFRIFIYTANKNIEEIILSLFKLVSTFSGFGAKTRKGFGEFLILEPSFDRNNYKDAIEGCQKAIEKFMKIHNSRSDIKFKPSQNTFAEIPEFPNFCDYNIFEFSIRDCRFWSDALKKFSYTYRNLKRILRKSKGDCVKEIVDALRGIKREVILPPAVMGLPLLYQRLKGFEDKRVAIFSSLQNLDLEEKRGRKPSPLFISLHEDGGNWKVAVLVMRSRITSNEEGKLETILFEDEGKEKESLFIVRMNERESYEELYKCLRKQSKEIQGG

SEQ ID NO: 1302 - DNA, 2439 bp, Thermotoga sp
gtgagcgaaagagaagaattctggaaatctaagataaccgctcttcttcatgatccactggtgaaggcgttcgatgtgaaaaatcatgaagatatagctggcgagatcctaaagacccttggcatagaaaaatcaagaggtgaagaagatcgtcttgcaagcgcgatggacaggtttcccattccatacgaaaaagatgcaaaaaaacaaattcatgtttcgttcgatgagactctctttgttcatccattctccggtgaagagttaccggaagtgaaaagtttctttcaaaatcagaaagttgaagaaatgaagagccgtctgataaacgcattgacaaagctgaaagagagaaacaatacgtacgaaaagctctttcattccatctggtggaatctgccgtacattctggagggaagtcagtttcttcctgctgataccagaatagcgaatcactcgatcatagaccatctcgacgtaacatcggctctcaagggatgtgtagaggggaaacaggtgaaggcatctctaatagcggtagcgataggccctgttcaagaagtgatagcccaggcaaggaaagtgaaagacctttgggctggaagttatcttctttcttatctcatctacggtgccatagaagtcgttggcaaaaagtacggcttcgattccatcatctcaccgtatttgagaggaaactatttcgtcaaggaaacactcgaaacgatgggagtagatcttgaagatctctgtcctgttctacctcggagggaagtcgcttctcttccaaacctttttgtcgcgatagttccatcctcggacgaagaaatactcaaagaatgtgaggaagcgataaagaacagatgggaaacaatagttgataaaacaaaagaaaagctcagtaaaagcgaatttcttttcaacgagcgttcgttcgattaccaagcgtctctctttccggacattcagacatcgaaggtgtctttcgatgaacctgaaaagatagttgaaacggtcagaaacttgttcacgggatcgggaattgaagatttcaaggaagttctgaggaaagtatcggaacacgctggttacaaagagaatcctgggacgttttacaggtacctccatcgtcttctgacctcaaaactcgctgcgagaaagatggccagactttttccgggatacgaagaagatgtttattcaccccacttcaccagtgaaaaagagtttctcgatttcttgaaagaaaaagaggaagagctcttccacgacgcggacgatttcggggctggagtcagagcctgtgctgtgtgcagagacatagaaaaaaaggacaggctcggaactctgaacactgtgaagagatttcttccggaaatcctcaatatcaggataaaattcgactcaacaacagatattgcaagaaacaatcaggcaaataaggaaatcgaggatcccgcaaaattcaagaacggatacatagctgttctcctcatggatggagatcgaatgggtgattggatgcttggagagaacgcaccttccctggaaaaggtaataaatccgaaagtgattgagatgtttcaagaaacagatgatctcaaatatgcatgggaaaaactgaaggaattcaaaaccattcagccagcctatcacaggggtgtttcgaggacactcggtatcttctctcaatttgtcgggaaaattgttgatagacacaacgggatgctcgtttacagcggtggagacgatgttctggcgcttcttccagcagacagcgtactggaatgtgcgaacgacatcagaaaattcttttcgggatacctggagtacgaaatagagattgaaaacggctctgatgtggaaagattcagatcagaaaacggtgtcctgtaccacaacgacaagcctttcgctcctctaatgggaaaagtcgctactatgagcgcaggaatcgcaattgttcatcacaaatttccactacaggtggctctgaatatggcaagggaagcagagaagaaagcaaagagagtctacggaagaaacgcgttctgtgtggcacaggtgaagagatcgggacaaatcgtttttgccggatccaggtgggagattgaaggagaagacgttgtcaggagatcgttgaaaatccttgaggagatgaaaaattacaatgtttcacaccgcagtctttacaaacttctctctccggacttctcgctctacgaggacaaaatggaaaagtttgtagagttcactttgagaagatcgatccattcagagaaatcgaagaatgagttcattggaaatttcaaggattttctgggtcggatggtagattactacaaaaacacgaaaagggcctcctttgacgaagcaatgagagaagcactggaatttctcataatggtgtactcgatgaagagaggtgagtcgcaatga

SEQ ID NO: 1303 - protein, 812 aa, Thermotoga sp
MSEREEFWKSKITALLHDPLVKAFDVKNHEDIAGEILKTLGIEKSRGEEDRLASAMDRFPIPYEKDAKKQIHVSFDETLFVHPFSGEELPEVKSFFQNQKVEEMKSRLINALTKLKERNNTYEKLFHSIWWNLPYILEGSQFLPADTRIANHSIIDHLDVTSALKGCVEGKQVKASLIAVAIGPVQEVIAQARKVKDLWAGSYLLSYLIYGAIEVVGKKYGFDSIISPYLRGNYFVKETLETMGVDLEDLCPVLPRREVASLPNLFVAIVPSSDEEILKECEEAIKNRWETIVDKTKEKLSKSEFLFNERSFDYQASLFPDIQTSKVSFDEPEKIVETVRNLFTGSGIEDFKEVLRKVSEHAGYKENPGTFYRYLHRLLTSKLAARKMARLFPGYEEDVYSPHFTSEKEFLDFLKEKEEELFHDADDFGAGVRACAVCRDIEKKDRLGTLNTVKRFLPEILNIRIKFDSTTDIARNNQANKEIEDPAKFKNGYIAVLLMDGDRMGDWMLGENAPSLEKVINPKVIEMFQETDDLKYAWEKLKEFKTIQPAYHRGVSRTLGIFSQFVGKIVDRHNGMLVYSGGDDVLALLPADSVLECANDIRKFFSGYLEYEIEIENGSDVERFRSENGVLYHNDKPFAPLMGKVATMSAGIAIVHHKFPLQVALNMAREAEKKAKRVYGRNAFCVAQVKRSGQIVFAGSRWEIEGEDVVRRSLKILEEMKNYNVSHRSLYKLLSPDFSLYEDKMEKFVEFTLRRSIHSEKSKNEFIGNFKDFLGRMVDYYKNTKRASFDEAMREALEFLIMVYSMKRGESQ

SEQ ID NO: 1304 - DNA, 993 bp, Thermotoga sp
atgaagctgtgggcgatatacttcgaacccgaagattgggttggtttcagagagactagaagattttctttttctgatagggtggagagtgtatttccatcttcttttccattttacggtgctgtgagaacagctcttttgatgaaaaatcagaaattcgatcccggaaatgctgaaagagcaggagacataaggatgttcggcccttttgtttttaaaaatacccctgaaggaaggaagcactactttcctcttccaagaaacatatataaaacggattctggttacagagtcactcccattgtcgagattgatggaggttaccttccctggaaacctgagtacaggatggatagtaaggaatctatgtctggggggctcatagaactgggtgatctcgaacttctcaggagtaacactcagggtgtgtgtaaattcgatcttgtttccacggaaaaaatctttaagaaggaaacccacataggaatagcttttgaagagaacaggaaaaaagcgaaagaaggtatgatatactcgatctcttactacagatttcacaatggaggatttttcatgctcacagacgatgaaagaacggtcgagcttgtttcaaaactcgacggtgtgtttctcgggatgaagagcaggtgggcggcggtcaaggttggagaagtgaacaccactgcttttgaacctccagactatgagaatgtagcggttgctctcataacaccggctgttttcgatggaggagggatgccgaaggataggaccattcttggaaagaaagttctcacaaccgcagggattagaaagctggttgtttccggatgggacctctgcaaaaatagaccaaagaagatctatcatgctgtctctccgggagctgtttactatctggaaggtaaggtcagtggacatgtgctgaatgaaagtaagttcacggattttggttttggaagatgtgtcttcatgaagtacgaaaaactttga

SEQ ID NO: 1305 - protein, 330 aa, Thermotoga sp
MKLWAIYFEPEDWVGFRETRRFSFSDRVESVFPSSFPFYGAVRTALLMKNQKFDPGNAERAGDIRMFGPFVFKNTPEGRKHYFPLPRNIYKTDSGYRVTPIVEIDGGYLPWKPEYRMDSKESMSGGLIELGDLELLRSNTQGVCKFDLVSTEKIFKKETHIGIAFEENRKKAKEGMIYSISYYRFHNGGFFMLTDDERTVELVSKLDGVFLGMKSRWAAVKVGEVNTTAFEPPDYENVAVALITPAVFDGGGMPKDRTILGKKVLTTAGIRKLVVSGWDLCKNRPKKIYHAVSPGAVYYLEGKVSGHVLNESKFTDFGFGRCVFMKYEKL

SEQ ID NO: 1306 - DNA, 879 bp, Thermotoga sp
atggaaggaagagtcttccttctttacgcggaaactcaggttcatgctggaactggtttcgaaataggagttgttgacctgcctattcagagggagagaaccacgcgctttcccatcataaacggaataaagggagcgttaagggcatatcttagacctcgtattgagaaaaatttagaagaaaagatatttggcagtgagtcgggaagtggcaaaggaaccagtgagtcagaaagtgtcaaaggaacggttcctggtagtttgagcttttctgaagcgagaattctccttttccccgtgagaaacccggataggctttttgtgtgggttacgtgtcctcttgtactgataaaatttgcgaaatctgtaggggataacgatgttgttaaagaactagaagaggtgaatattgattatggaaaggcagtctccttctatggatccggtgaggtgttccttgaggaagtaaaattaaagtcagctgcttttgaacttccaaggacaagggaattgatatcgaagatttccaattgtgctccagtcgattacctgaaaaagaaaatgaaaagcgatgtggttgtggtgaatgatgttctcttctcagaaatcgctcaaactatgacagaagttgtaccgagagtgagaataaacagagagaagaaaaccgttgaagaaggtggtttgtggtacgaggaatatctgcctcaggatacggtgatgtactttgtggtgaggaagacgtactacggcaacaaagaagattccgggaaagattctttgatggaaattttcaagaacgaagtggatggaaaattgatcaacatcggaggaaaagaaaccgtcggaaagggcatgatgtgggtacatgcctggaggtga

SEQ ID NO: 1307 - protein, 292 aa, Thermotoga sp
MEGRVFLLYAETQVHAGTGFEIGVVDLPIQRERTTRFPIINGIKGALRAYLRPRIEKNLEEKIFGSESGSGKGTSESESVKGTVPGSLSFSEARILLFPVRNPDRLFVWVTCPLVLIKFAKSVGDNDVVKELEEVNIDYGKAVSFYGSGEVFLEEVKLKSAAFELPRTRELISKISNCAPVDYLKKKMKSDVVVVNDVLFSEIAQTMTEVVPRVRINREKKTVEEGGLWYEEYLPQDTVMYFVVRKTYYGNKEDSGKDSLMEIFKNEVDGKLINIGGKETVGKGMMWVHAWR

SEQ ID NO: 1308 - DNA, 363 bp, Thermotoga sp
atgaagacgctcagcctcgaactggcaaaactggctatgaatttgatcgaagaagttgaggaagacaaaagagatgattacctcaggactgtgaagagtcttggaagtatgatcgttcaaaacggtttgatgggaacaattctctttctgaaaaagaaaggaaaaaacaaggtggtggatcaccttggaaagatgatcgaacacctgacactggaagatagtatcgtcgaaaaactgatgaaaaacgagccactggatgcccgcacgtatttgaaagcacagatcgctgctcttgaatgcgcaaaatggctcaaaagatgtggagagattctcctgggtggtgaagagaatgagactacctga

SEQ ID NO: 1309 - protein, 120 aa, Thermotoga sp
MKTLSLELAKLAMNLIEEVEEDKRDDYLRTVKSLGSMIVQNGLMGTILFLKKKGKNKVVDHLGKMIEHLTLEDSIVEKLMKNEPLDARTYLKAQIAALECAKWLKRCGEILLGGEENETT

SEQ ID NO: 1310 - DNA, 729 bp, Thermotoga sp
atgagactacctgaaagcaaaaacctcagtctttattgggaaaagtacagttttcttttgtttgagagttcagactcaaaagataaagagaaagagatagtaggcaagatcttccaaaccgttgagaaattgcaatccgattttggaaagatcagtaacatcctcaaagaaagaagggaacagctgatcaggaagagaaagccgtttatcaacttaaagatgaaagtgaaaggaaaactcttgcttggggctggtaatccttctcctatcgaggtgggaataactctttccagaaactacgggcttcccataattcctggcaccgctatcaaagggacgtttgccagttttctattcgaattcgaaagggataaatacgaatcactcgctcatatttttggagacactgaaagagagggggatctcatttttctcgatgcgatacctgtttcggatttgaaattctcactggatatcgtcaatccgcactttcagccgtattatatgaaagagaaacttcctcctaacgactggtacaaccctgttccaaaaaagtacttggtggtgagcagtggtgtattctggtttactgttcttgagagtcgttccggagttattggaaattctgaaaaagaactaataaaacagagattcgtggagatgctcagaacttatggtgtaggcgcaaagactagctatgggtacggtcgtttcaaagatcttacctga

SEQ ID NO: 1311 - protein, 242 aa, Thermotoga sp
MRLPESKNLSLYWEKYSFLLFESSDSKDKEKEIVGKIFQTVEKLQSDFGKISNILKERREQLIRKRKPFINLKMKVKGKLLLGAGNPSPIEVGITLSRNYGLPIIPGTAIKGTFASFLFEFERDKYESLAHIFGDTEREGDLIFLDAIPVSDLKFSLDIVNPHFQPYYMKEKLPPNDWYNPVPKKYLVVSSGVFWFTVLESRSGVIGNSEKELIKQRFVEMLRTYGVGAKTSYGYGRFKDLT

SEQ ID NO: 1312 - DNA, 36 bp, Thermus thermophilus
gttgcaagggattgagccccgtaaggggattgcgac

SEQ ID NO: 1313 - DNA, 1755 bp, Thermus thermophilus
atggagcaccttctcgctatcgccctgggcccggtgcaggagttcatcgccaccgcccgcaggacccgggacctctacgcgggaagccgcctcctctccgaggcggccgcccgcgccgccgaggccctggcccgggaggtgggggcgaaaaacctcattttccccgcccccgaggacgaggcggggctggagcggctggccggggcgggcatccccaacgttcttttggtccgggttccggaggggaaggaccccaggggcctcggggaacaagccttgggagccgcccgggactacctccgggagagggcggaggaagttctggggccgcgcagggacctccttttctggagggaggccctggcccaggtggaagacctcctggagggctactacgcctaccttcccttggagggcgactatccccgggcccgggagcggctcatggccctcctggccgcccgcaaaaacacccgggacttcgcccccgtctcctggggaagcccggcctacaagagctccctggacggggcccgggagagcgtcctccgcctgcccgaaagggaggcggaccacctcagggtgcggctcggcctgcgccccggggagtaccttgcggggcccgacctcctcaagcgctggtggaaggcggggcacggcttccttagcaccacccacatggcggccctgcccttctgggagggggtcaggcgggcgggcctggaggcggtcctaaaggaggccctggaggagcttgggggcctcgtgggggaggaggcgcgggcggaggtccgccacccggttttgcgggacacccccttcggggagtgggacgtgcgcctcctctacgagagccgcctcgaggagtttccctccctcgccgaggaccccgggcttctggagaaggcgcgggaccgcctgagggcgctttggcggaggctttcccccaaggtgagggttcccccgggcgcctactacgccctcctccacgccgacggggaccggatgggggagaccctggacggccttccgtcccccgaggcccaccgccgcttctccaacgccctggccctggggttcgccgcccaggtcaaggacatcgtggaggcccacgggggcgggctcgtctactcggggggggacgacgtcttggccctgcttcccctccacacggccctcatggccgcgagggccctggcggaccgcttccgggaggccatggcccccttcggccgggagggccgggcgccgagcctctccgtgggcctcgcggtggtccaccacctggagcctctgcaggacgccctggacctggcccgccgggcggagaaatgggcgaaggagggcgagcccaagcgcaacgccctctgcgtggcctacagcccccgctcgggggcggagcgcctggtccggggccggtgggacgagaacccccccctcacccgccgcctcctccgctacgccgacctcctgcgggcgggggaggtgccttccagggccgcctacgagcttctggccctggtccgggaagcgggggaggccctccccggggaggccctggtggccgaggccctgcggatcctggggaggaaggagatgaagcgggcctaccgggaggagctcgaggcctggctccggaccggggaggacgtgcgccgcctggcggaggagctcatcctcgcccggcccttcgccgaggccctggaccaggcgggcgtacccgtggagagccgggaggtgtgggatgctcattga

SEQ ID NO: 1314 - protein, 584 aa, Thermus thermophilus
MEHLLAIALGPVQEFIATARRTRDLYAGSRLLSEAAARAAEALAREVGAKNLIFPAPEDEAGLERLAGAGIPNVLLVRVPEGKDPRGLGEQALGAARDYLRERAEEVLGPRRDLLFWREALAQVEDLLEGYYAYLPLEGDYPRARERLMALLAARKNTRDFAPVSWGSPAYKSSLDGARESVLRLPEREADHLRVRLGLRPGEYLAGPDLLKRWWKAGHGFLSTTHMAALPFWEGVRRAGLEAVLKEALEELGGLVGEEARAEVRHPVLRDTPFGEWDVRLLYESRLEEFPSLAEDPGLLEKARDRLRALWRRLSPKVRVPPGAYYALLHADGDRMGETLDGLPSPEAHRRFSNALALGFAAQVKDIVEAHGGGLVYSGGDDVLALLPLHTALMAARALADRFREAMAPFGREGRAPSLSVGLAVVHHLEPLQDALDLARRAEKWAKEGEPKRNALCVAYSPRSGAERLVRGRWDENPPLTRRLLRYADLLRAGEVPSRAAYELLALVREAGEALPGEALVAEALRILGRKEMKRAYREELEAWLRTGEDVRRLAEELILARPFAEALDQAGVPVESREVWDAH

SEQ ID NO: 1315 - DNA, 1086 bp, Thermus thermophilus
atgctcattgagcccagggatcctttgatcgtgcgggacggcaggcccttcaccaacagccccggggcccgggccaagagccttcccttccccctgccccagaccctggccggggcctaccgcacccgccgcgccctcctggagggccttcctctccccgagagggcggaggaggtcctccggtggggcctcagggggcccctcctcgccgaggagggggaaggggggtggcggctcctggcgccccggcctctggacgccctaaagctcggggaggccctctaccccctccggcccctggagcttccccaaggggccgggaccaacctgccggaggggctttctcccgtgggtcttcccagcccggccctcaaggagaagcccgcccccctgcccgccttctggtactgggagagcttcctggaatggctccttcaagacgccccggcgggtttcgcccccagggggcacgaggggcccgtcccggagacgcgcacccacgtggccctggaccccgcggcccagacggcccgggaggggttcctctttcagacctcggggctggagtttgtccgagggaggcgccgcctcgccctggtgctctggcccgaggggccggagcccgagggggtcttccccctggggggggagaggcgcctcgccttctggcagaaaggcgggcccggggttcctcccctgcccgaggaggtggtggcggggctcctccgccacagggcggcccgcctcgtcttcctcacccccgccttcttgggggaggcttacctccccaaggggagggccttccaaggggcttccgtggtggccgcggtggtggggaggccggttgcggtctcgggctggaacctcaaggaggggaagcccaagccgagccgccgggccgtgcccgcggggagcgtctacttcgtccggttcccggaggcctggggggaaggggaggtccgggattgggcggggaaggtctggttccagaacctctccgaggaggagcaggaccggcgggacgggttcggcctggccgccctgggcctttgggacgggaagcttaggcgctgggaggaggcatga

SEQ ID NO: 1316 - protein, 361 aa, Thermus thermophilus
MLIEPRDPLIVRDGRPFTNSPGARAKSLPFPLPQTLAGAYRTRRALLEGLPLPERAEEVLRWGLRGPLLAEEGEGGWRLLAPRPLDALKLGEALYPLRPLELPQGAGTNLPEGLSPVGLPSPALKEKPAPLPAFWYWESFLEWLLQDAPAGFAPRGHEGPVPETRTHVALDPAAQTAREGFLFQTSGLEFVRGRRRLALVLWPEGPEPEGVFPLGGERRLAFWQKGGPGVPPLPEEVVAGLLRHRAARLVFLTPAFLGEAYLPKGRAFQGASVVAAVVGRPVAVSGWNLKEGKPKPSRRAVPAGSVYFVRFPEAWGEGEVRDWAGKVWFQNLSEEEQDRRDGFGLAALGLWDGKLRRWEEA

SEQ ID NO: 1317 - DNA, 1188 bp, Thermus thermophilus
atgagaagggcgtttcgtgaggcgttctcgccgaggcgaaaggaggagggagaggtcctggtgcgccgggacggcgcgcgggtcctcgcctgggagcgcacgtacacgctcctcacccccctcttcgggggcggggtggagcctagggaggcggatccggtgagcgtggtccgggccacggcggtccgggggcacctccgcttctggtggcgggccgtgagggggtggcgggcggggggttcgctggagaggctttgggagctggagtccgccttgttcggccacgcgggggagggcggggcctcgcccttgagcgtggaggtggaggttctaagggaaggggaaaaggtaggcatcgcccagtacggccgcgcagtccagtggtacctgggctttcctctacgcggggacaaggaatgggccccggtcaaggagggcgtggccttccgcctccgcctccgctttcccgaaaaggtaggggagctgaacttctgggaggagctcgaggccgccctctgggcctgggagaccttcggggggatcggggcccggacccggaggggctttggcgccctcctgccccagggggccggggtgccgggggaggaggagatccgagagaagcttcgccagtatagccaaaaagcagggtggcccgaaggggtgccccacctcaccccaaaaagcttcgtgcgggtggtgcccctctcctggaaagaactcgccgagcgctaccaggccttccgccaggcccgccccgggggggaccccagaagcccgggccgctcctactggcccgagcccgacggggtgcggcgcctcacggggcggcacgccccccaccacctgcccaggcaccccgtgcacaagttcccccgggcccacttcggcctgcccatcatcttccacttcaaggacaggggcgacccccccgacaccaccctccggctcaaggaggccgaccgccgggcgagccccctcctcttccgcccgcttggggaagggcagaagccctgcgtggtggcggtcctcgagggggccaggttccctggggaaaagcttgttttggagggcaaagacggccgcacttgggacgtggacccctggctcacccccgaggaggcccaaaagatcccggtgctggggggtgaggcggaccccgtcttggccttcgtgaaaagcttgtag

SEQ ID NO: 1318 - protein, 395 aa, Thermus thermophilus
MRRAFREAFSPRRKEEGEVLVRRDGARVLAWERTYTLLTPLFGGGVEPREADPVSVVRATAVRGHLRFWWRAVRGWRAGGSLERLWELESALFGHAGEGGASPLSVEVEVLREGEKVGIAQYGRAVQWYLGFPLRGDKEWAPVKEGVAFRLRLRFPEKVGELNFWEELEAALWAWETFGGIGARTRRGFGALLPQGAGVPGEEEIREKLRQYSQKAGWPEGVPHLTPKSFVRVVPLSWKELAERYQAFRQARPGGDPRSPGRSYWPEPDGVRRLTGRHAPHHLPRHPVHKFPRAHFGLPIIFHFKDRGDPPDTTLRLKEADRRASPLLFRPLGEGQKPCVVAVLEGARFPGEKLVLEGKDGRTWDVDPWLTPEEAQKIPVLGGEADPVLAFVKSL

SEQ ID NO: 1319 - DNA, 861 bp, Thermus thermophilus
atgagccacgttgcgcttcttttcctgcatgccctctcccctctgcacgcggggacggggcaaggcatcggggccatagacctgcccatcgcccgggagaaggccacgggcatcccctacctaccgggaagctccctcaagggggtgctccgggaccgggcttccgcctgggacagggacaccctcttcgccgtctttgggcccgacacggaaaacgcctcggagcacgccggggcggtgcaggtgggggacgccaagctcctcctcctccccgtgcggagcctctacggggtcttcgccctggccacgagcccctacctcctggagcgcttccgccgtgaggccctcatggcgggccttcaaccccctggggttcccgggctccgggaccccacccaggtcctcttggccccggggtcccgccttttgggagacggggagaaggtctacctcgaggacctggacctgaaggcccagggggaggagggggtcgccgcctgggagcggtggcttgccgagcgcaccgaggccccggtcctgggaaggctcgccgtggtgcacgacgacctcatgggcttcctcctggagaccgccacggaggtggtggcccgcatccgcctggacgacgagaccaagaccgtggccaagggggccctctggtacgaggagagcctccccgcggaaagcctcctctacgccctggtgcgggccgaccgctccttccgcaaggggaaggagcttcgcccagagggcgtctggggcctcttccggggcgtcttggaggagggcgggggggtgctccagcttgggggcaaggccaccgtgggccggggcctctgccgggtccgggtggggaggtag

SEQ ID NO: 1320 - protein, 286 aa, Thermus thermophilus
MSHVALLFLHALSPLHAGTGQGIGAIDLPIAREKATGIPYLPGSSLKGVLRDRASAWDRDTLFAVFGPDTENASEHAGAVQVGDAKLLLLPVRSLYGVFALATSPYLLERFRREALMAGLQPPGVPGLRDPTQVLLAPGSRLLGDGEKVYLEDLDLKAQGEEGVAAWERWLAERTEAPVLGRLAVVHDDLMGFLLETATEVVARIRLDDETKTVAKGALWYEESLPAESLLYALVRADRSFRKGKELRPEGVWGLFRGVLEEGGGVLQLGGKATVGRGLCRVRVGR

SEQ ID NO: 1321 - DNA, 345 bp, Thermus thermophilus
gtgcgcacccgctcgcaggtgtgggcccagaaggcctacgagaaggtccgggaagcggccaagggcgagggccggggcgagtaccgggacatggccctaaagcttcccgtcctggtgcgtcaggcggggctttcccaggccctggccttcgtggactcccgggggaaggaggcccacaaggccctggggaaccacctggcccaggtgctgggctaccgggacctccgggagctggcggaggccgcccgggaggccgagctcctccagtacctccgcctcacccgggaggtcctggccgcggcggagtggttcaagcgcttcgcccaggccctcattgaggagtag

SEQ ID NO: 1322 - protein, 114 aa, Thermus thermophilus
MRTRSQVWAQKAYEKVREAAKGEGRGEYRDMALKLPVLVRQAGLSQALAFVDSRGKEAHKALGNHLAQVLGYRDLRELAEAAREAELLQYLRLTREVLAAAEWFKRFAQALIEE

SEQ ID NO: 1323 - DNA, 777 bp, Thermus thermophilus
gtgctggagacggccctcaccctgcaccgcgcctacggggtgccctacatcccgggctcggccctgaagggcctggcgagccgctacgcccacctttatctggagggcgaggcctggcggcgcgacctcgcccgcttccaccagggcgaggcccaggcggggcttttcggcaccacggaggagcagggcctcgtggtcttctgggatgccctcccccttcccgggaagtggaagctccaccccgacattctgaacccccaccaccctgactactacgggagcggggaggccccccctgcggactgggacagcccagtcccggtccccttcctctccgccacgggcaccttcctcctcgccctctccccggcccccggggtttctcccgaggaggccgggccctggcttcgggccgcctggcgcatcctggcctgggccctgcgggaggagggggtgggggccaagacctcctcggggtacgggcgcatagccctggaggagcctgcgtcccaaggggaaaagcccctggcgccggggccgagcccggtccttcaggacctcctcacccgggcccgcgccctctcctacagggaggtgccccgcttcctggcctcccaggcggaggccatcctgggcctctcggtggaggaggcccaggcccttcgccgggccctggaggagcggggcttcctccgcaacccccaggacctgaagcgctggcgcaaggagcatcccggcctggaaggggttctcgccaagctgggcctctcggcctag

SEQ ID NO: 1324 - protein, 258 aa, Thermus thermophilus
MLETALTLHRAYGVPYIPGSALKGLASRYAHLYLEGEAWRRDLARFHQGEAQAGLFGTTEEQGLVVFWDALPLPGKWKLHPDILNPHHPDYYGSGEAPPADWDSPVPVPFLSATGTFLLALSPAPGVSPEEAGPWLRAAWRILAWALREEGVGAKTSSGYGRIALEEPASQGEKPLAPGPSPVLQDLLTRARALSYREVPRFLASQAEAILGLSVEEAQALRRALEERGFLRNPQDLKRWRKEHPGLEGVLAKLGLSA

SEQ ID NO: 1325 - DNA, 36 bp, Thermus thermophilus; identical to SEQ ID NO: 1312

SEQ ID NO: 1326 - DNA, 1755 bp, Thermus thermophilus
atggagcaccttctcgctatcgccctgggcccggtgcaggagttcatcgccaccgcccgcaggacccgggacctctacgcgggaagccgcctcctctccgaggcggccgcccgcgccgccaaggccctggcccgggaggtgggggcgaaaaacctcattttccccgcccccgaggacgaggcggggctggagcggctggccggggcgggcatccccaacgttcttttggtccgggttccggaggggaaggaccccaggggcctcggggaacaagccttgggagccgcccgggactacctccgggagagggcggaggaagttctggggccgcgtagggacctccttttctggagggaggccctggcccaggtggaagacctcctggagggctactacgcctaccttcccttggagggcgactatccccgggcccgggagcggctcatggccctcctggccgcccgcaaaaacacccgggacttcgcccccgtctcctggggaagcccggcctacaagagctccctggacggggcccgggagagcgtcctccgcctgcccgaaaaggaggcggaccacctcagggtgcggctcggcctgcgccccggggagtacctcgcggggcccgacctcctcaagcgctggtggaaggcggggcacggcttccttagcaccacccacatggcggccctgcccttctgggagggggtcaggcgggcgggcctggaggcggtcctaaaggaggccctggaggagcttgggggcctcgtgggggaggaggcgcgggcggaggtccgccacccggttttgcgggacacccccttcggggagtgggacgtgcgcctcctctacgagagccgcctcgaggagtttccctccctcgccgaggaccccgggcttctggagaaggcgcgggaccgcctgagggcgctttggcggaggcttttccccaaggtgagggttcccccgggcgcctactacgccctcctccacgccgacggggaccggatgggggagaccctggacggccttccgtcccccgaggcccaccgccgcttctccaacgccctggccctggggttcgccgcccaggtcaaggacatcgtggaggcccacgggggcgggctcgtctactcggggggggacgacgtcttggccctgcttcccctccacacggccctcatggccgcccgggccctggcggaccgcttccgggaggccatggcccccttcggccgggagggccgggcgccgagcctctccgtgggcctcgcggtggtccaccacctggagcctctgcaggacgccctggacctggcccgccgggcggagaaatgggcgaaggagggcgagcccaagcgcaacgccctctgcgtggcctacagcccccgctcgggggcggagcgcctggtccggggccggtgggacgagaaccctcccctcacccgccgcctcctccgctacgccgacctcctgcgggcgggggaggtgccctccagggccgcctacgagcttctggccctggtccgggaagcgggggaggccctctccggggaggccctggtggccgaggccctgcggatcctggggaggaaggagatgaagcgggcctaccgggaggagctcgaggcctggctccggaccggggaggacgtgcgccgcctggcggaggagctcatcctcgcccggcccttcgccgaggccctggaccaggcgggcgtgcccgtggagagccgggaggtgtgggatgctcattga

SEQ ID NO: 1327 - protein, 584 aa, Thermus thermophilus
MEHLLAIALGPVQEFIATARRTRDLYAGSRLLSEAAARAAKALAREVGAKNLIFPAPEDEAGLERLAGAGIPNVLLVRVPEGKDPRGLGEQALGAARDYLRERAEEVLGPRRDLLFWREALAQVEDLLEGYYAYLPLEGDYPRARERLMALLAARKNTRDFAPVSWGSPAYKSSLDGARESVLRLPEKEADHLRVRLGLRPGEYLAGPDLLKRWWKAGHGFLSTTHMAALPFWEGVRRAGLEAVLKEALEELGGLVGEEARAEVRHPVLRDTPFGEWDVRLLYESRLEEFPSLAEDPGLLEKARDRLRALWRRLFPKVRVPPGAYYALLHADGDRMGETLDGLPSPEAHRRFSNALALGFAAQVKDIVEAHGGGLVYSGGDDVLALLPLHTALMAARALADRFREAMAPFGREGRAPSLSVGLAVVHHLEPLQDALDLARRAEKWAKEGEPKRNALCVAYSPRSGAERLVRGRWDENPPLTRRLLRYADLLRAGEVPSRAAYELLALVREAGEALSGEALVAEALRILGRKEMKRAYREELEAWLRTGEDVRRLAEELILARPFAEALDQAGVPVESREVWDAH

SEQ ID NO: 1328 - DNA, 1086 bp, Thermus thermophilus
atgctcattgagcccagggatcctttgatcgtgcgggacggcaggcccttcaccaacagccccggggcccgggccaagagccttcccttccccctgccccagaccctggccggggcctaccgcacccgccgcgccctgctggagggccttcctctccccgagagggcggaggaggtcctccggtggggcctcagggggccccttctcgccgaggagggggaaggggggtggcggctcctggcgccccggcctctggacgccctaaagctcggggaggccctctaccccctccggcccctggagcttccccagggggccgggaccaacctgccggaggggctttctcccgtgggtcttcccagcccggccctcaaggagaagcctgcccccctgcccgccttctggtactgggagagcttcctggaatggctccttcaggacgccccggcgggtttcgcccccagggggcacgaggggcccgtcccggagacgcgcacccacgtggccctggaccccgcggcccagacggcccgggaggggttcctctttcagacctcggggctggagtttgtccgagggaggcgccgcctcgccctggtgctctggcccgaggggccggagcccgagggggtcttccccctggggggggagaggcgcctcgccttctggcagaaaggcgggcccggggttcctcccctgcccgaggaggtggtggcggggctcctccgccacagggcggcccgcctcgtcttcctcacccccgccttcttgggggaggcttacctccccaaggggagggccttccaaggggcttccgtggtggccgcggtggtggggaggccgcttgcggtctcgggctggaacctcaaggaggggaagcccaagccgagccgccgggccgtgcccgcggggagcgtctacttcgtccggctcccggaggcctggggggaaggggaggtccgggattgggcggagaaggtctggttccagaacctctccgaggaggagcaggaccggcgggacgggttcggcctggccgccctgggcctttgggacgggaagcttaggcgctgggaggaggcatga

SEQ ID NO: 1329 - protein, 361 aa, Thermus thermophilus
MLIEPRDPLIVRDGRPFTNSPGARAKSLPFPLPQTLAGAYRTRRALLEGLPLPERAEEVLRWGLRGPLLAEEGEGGWRLLAPRPLDALKLGEALYPLRPLELPQGAGTNLPEGLSPVGLPSPALKEKPAPLPAFWYWESFLEWLLQDAPAGFAPRGHEGPVPETRTHVALDPAAQTAREGFLFQTSGLEFVRGRRRLALVLWPEGPEPEGVFPLGGERRLAFWQKGGPGVPPLPEEVVAGLLRHRAARLVFLTPAFLGEAYLPKGRAFQGASVVAAVVGRPLAVSGWNLKEGKPKPSRRAVPAGSVYFVRLPEAWGEGEVRDWAEKVWFQNLSEEEQDRRDGFGLAALGLWDGKLRRWEEA

SEQ ID NO: 1330 - DNA, 1188 bp, Thermus thermophilus
atgagaagggcgtttcgtgaggcgttctcgccgaggcgaaaggaggagggaggggtcctggtgcgccgggacggcgcgcgggtcctcgcctgggagcgcacgtacacgctcctcacccccctcttcgggggcggggtggagcctagggaggcggatccggtgagcgtggtccgggccacggcggtccgggggcacctccgcttctggtggcgggccgtgaggggctggcgggcggggggttcgctggagaggctttgggagctggagtccgccttgtttggcagcgcgggggagggcggggcctcgcccttgagcgtggaggtggaggttctaagggaaggggaaaaggtaggcatcgcccagtacggccgcgcagtccagtggtacctgggctttcctctacgcggggacaaggaatgggccccggtcaaggagggcgtggccttccgcctccgcctccgctttcccgaaaaggtgggggagctgaacttctgggaggagctcgaggccgccctctgggcctgggagaccttcggggggatcggggcccggacccggaggggctttggcgccctcctgccccagggggccggggtgccgggggaggaggagatccgagagaagcttcgccagtatggccaaaaagcagggtggcccgaaggggtgccccacctcaccccaaaaagcttcgtgcgggtggtgcccctctcctggagagaactcgccgagcgctaccaggccttccgccaggcccgccccgggggggaccccagaagcccgggccgctcctactggcccgagcccgacggggtgcggcgcctcacggggcggcacgccccccaccacctgcccaggcaccccgtgcacaagttcccccgggcccacttcggcctgcccatcatcttccacttcaaggacaggggcgacccccccgacaccaccctccggctcaaggaggccgaccgccgggcgagccccctcctcttccgcccgcttggggaagggcagaagccctgcgtggtggcggtcctcgagggggccaggttccctggggaaaagcttgttttggagggcaaagacggccgcacttgggacgtggacccctggctcacccccgaggaggcccaaaagatcccggtgctggggggtgaggtggaccccgtcttggccttcgtgaaaagcttgtag

SEQ ID NO: 1331 - protein, 395 aa, Thermus thermophilus
MRRAFREAFSPRRKEEGGVLVRRDGARVLAWERTYTLLTPLFGGGVEPREADPVSVVRATAVRGHLRFWWRAVRGWRAGGSLERLWELESALFGSAGEGGASPLSVEVEVLREGEKVGIAQYGRAVQWYLGFPLRGDKEWAPVKEGVAFRLRLRFPEKVGELNFWEELEAALWAWETFGGIGARTRRGFGALLPQGAGVPGEEEIREKLRQYGQKAGWPEGVPHLTPKSFVRVVPLSWRELAERYQAFRQARPGGDPRSPGRSYWPEPDGVRRLTGRHAPHHLPRHPVHKFPRAHFGLPIIFHFKDRGDPPDTTLRLKEADRRASPLLFRPLGEGQKPCVVAVLEGARFPGEKLVLEGKDGRTWDVDPWLTPEEAQKIPVLGGEVDPVLAFVKSL

SEQ ID NO: 1332 - DNA, 861 bp, Thermus thermophilus
atgagccacgttgcgcttcttttcctgcatgccctctcccctctgcacgcggggacggggcaaggcatcggggccatagacctgcccatcgcccgggagaaggccacgggcatcccctacctgccgggaagctccctcaagggggtgctccgggaccgggcttccgcctgggacagggacaccctcttcgccgtctttgggcccgacacggaaaacgcctcggagcacgccggggcggtgcaggtgggggacgccaagctcctcctcctccccgtgcggagcctctacggggtcttcgccctggtcgcgagcccctacctcctggagcgcttccgccgtgaggccctcatggcgggccttcagcccccaggggttcccgggctccaggaccccacccgggtcctcttggccccggggtcccgccttttgggagacggggagaaggtctacctcgaggacctggacctgaaggcccagggggaggagggggtcgccgcctgggagcggtggcttgccgagcgcaccgaggccccggtcctgggaaggctcgccgtggtgcacgacgacctcatgggcttcctcctggagaccgccacggaggtggtggcccgcatccgcctggacgacgagaccaagactgtggccaagggggccctgtggtacgaggagagcctccccgcggaaagcctcctctacgccctggtgcgggccgaccgctccttccgcaaggggaaggagcttcccccagagggcgtctgggccctcttccggggcgtcttggaggagggcgggggggtgctccagctcgggggcaaggccaccgtgggccgggggctttgccggatcgtggtggggaggtag

SEQ ID NO: 1333 - protein, 286 aa, Thermus thermophilus
MSHVALLFLHALSPLHAGTGQGIGAIDLPIAREKATGIPYLPGSSLKGVLRDRASAWDRDTLFAVFGPDTENASEHAGAVQVGDAKLLLLPVRSLYGVFALVASPYLLERFRREALMAGLQPPGVPGLQDPTRVLLAPGSRLLGDGEKVYLEDLDLKAQGEEGVAAWERWLAERTEAPVLGRLAVVHDDLMGFLLETATEVVARIRLDDETKTVAKGALWYEESLPAESLLYALVRADRSFRKGKELPPEGVWALFRGVLEEGGGVLQLGGKATVGRGLCRIVVGR

SEQ ID NO: 1334 - DNA, 345 bp, Thermus thermophilus
gtgcgcacccgctcgcaggtgtgggcccagaaggcctacgagaaggtccgggaagcggccaagggcgagggccggggcgagtaccgggacatggccctaaagcttcccgtcctggtgcgccaggcggggctttcccaggccctggccttcgtggactcccgggggaaggaggctcacaaggccctgggtaacgacctggcccaggtgctgggctaccgggacctccgggagctggcggaggccgcccgggaggccgagctcctccagtacctccgcctcacccgggaggtcctggccgcggcggagtggttcaagcgcttcgcccaggccctcattgaggagtag

SEQ ID NO: 1335 - protein, 114 aa, Thermus thermophilus
MRTRSQVWAQKAYEKVREAAKGEGRGEYRDMALKLPVLVRQAGLSQALAFVDSRGKEAHKALGNDLAQVLGYRDLRELAEAAREAELLQYLRLTREVLAAAEWFKRFAQALIEE

SEQ ID NO: 1336 - DNA, 1047 bp, Thermus thermophilus
atgggccgcagatccgcgcttgagggcgtccgcctcccccaaggcaaggagccccaccggggcctctggctggacaagttcttgaggtcggcgaggcgggaggacaccgaggccaagcgggttctcgtccgggaagcggcggggatccccgagcccggggagtaccgggcgttttttaagcggtaccgcggggccctcgaggccctgggggccgaaatccgtgaggccaggaccctctcccgcctggtggtgggcctgggtggggaaggcgtgctggagacggccctcaccctgcaccgcgcctacggggtgccctacatcccgggctcggccctgaagggcctggcgagccgctacgcccacctctacctggagggcgaggcctggcggcgcgacctcgcccgcttccaccggggcgaggcccaggcggggcttttcggcaccacggaggagcagggcctcgtggtcttctgggatgccctcccccttcccgggaaatggaagctccaccccgacattctgaacccccaccaccctgactactatgggagcgtcaaagcgccccccgcggactgggacggccccaagccggtccccttcctctccgccacgggcaccttcctcctcgccctctccccggcccccggggtttctcccgaggaggccgggccctggcttcgggccgcctggcgcatcctggcctgggccctgcgggaggagggggtgggggccaagacctcctcggggtacgggcgcatggccctggaggagcctgcgtcccaaggggaaaagcccctggcgccggggccgagcccggtccttcaggacctcctcacctgggcccgcgccctctcctacagggaggtgccccgtttcctggcttcccaggcggaggccatcctgggcctctcggtggaggaggcccaggcccttcgccgggccctggaggagcggggcttcctccgcaacccccaggacctgaagcgctggcgcaaggagcatcccggcctggaaggggttctcgccaagctgggcctctcggcctag

SEQ ID NO: 1337 - protein, 348 aa, Thermus thermophilus
MGRRSALEGVRLPQGKEPHRGLWLDKFLRSARREDTEAKRVLVREAAGIPEPGEYRAFFKRYRGALEALGAEIREARTLSRLVVGLGGEGVLETALTLHRAYGVPYIPGSALKGLASRYAHLYLEGEAWRRDLARFHRGEAQAGLFGTTEEQGLVVFWDALPLPGKWKLHPDILNPHHPDYYGSVKAPPADWDGPKPVPFLSATGTFLLALSPAPGVSPEEAGPWLRAAWRILAWALREEGVGAKTSSGYGRMALEEPASQGEKPLAPGPSPVLQDLLTWARALSYREVPRFLASQAEAILGLSVEEAQALRRALEERGFLRNPQDLKRWRKEHPGLEGVLAKLGLSA

SEQ ID NO: 1338 - DNA, 732 bp, Myxococcus xanthus
atgagaccacgaggaggtgatgtcttggaacgtgccgatgacgaggaatcatctgctgcggcaacaggggcaacgcttcctgaccctgcgccgcgacagcggcggtccgtgcgcggccccgacctgactcgtttctccgtgagcttgagaaccgtgacccacagcttggatggcgcggcgacactccgtcaggtggacgtggtggaacctgtgcgcgtgccagcgctgcgaggccaactgcgtttctgctggcgtgccttgaatacgcacgcttgcgcaagtcccatggaactggcctctcgtgagcgggcgctctggggtggcacaggcggaggcgttgccatctgttcgaaggtagaattcggagggggcatatgcgctgtggcctgcacgagccaccaggacaggctcagcgccaaagcccccagccccatgttggagcgatgggttgtccttcacgcttcatgtcgccgttccatcggaatggctcactgcattcgagaacgcggttcgtgcttggagcatttggggcggcctcggggcgcgcacacgccgctggctgggaagtctgatgctgacctctcagcagtgttgccgcgcacggttgttgatggctcggtgaaccatctggttgctggcattgggactcctggtccccagtcgcgtctcgcactctcttctcaatcctttctcctgctgaaggggcgccatgtcctctctggttctgcctga

SEQ ID NO: 1339 - protein, 243 aa, Myxococcus xanthus
MRPRGGDVLERADDEESSAAATGATLPDPAPRQRRSVRGPDLTRFSVSLRTVTHSLDGAATLRQVDVVEPVRVPALRGQLRFCWRALNTHACASPMELASRERALWGGTGGGVAICSKVEFGGGICAVACTSHQDRLSAKAPSPMLERWVVLHASCRRSIGMAHCIRERGSCLEHLGRPRGAHTPLAGKSDADLSAVLPRTVVDGSVNHLVAGIGTPGPQSRLALSSQSFLLLKGRHVLSGSA

SEQ ID NO: 1340 - DNA, 424 bp, Artificial sequence
  A CRISPR construct for silencing of GFP expression in E. coli
ccatgggcaacctggggccgggaggggggaggtgcttgaaaagacgggagtaagttgccggaactgctgggagattcagatgggctgtgccgctcgccgtgatgccggaaggcgttgagcacaagcattgaacaccatacgtcagagtagtgacaagtgccgctcgccgtgatgccggaaggcgttgagcactttccgtatgttgcatcaccttcaccctctccgctgagtgccgctcgccgtgatgccggaaggcgttgagcactttaaaatcaataccttttaactcgatacgattaagtgccgctcgccgtgatgccggaaggcgttgagcacttgaaagatatagtgcgttcctgtacataaccttcgtgccgctcgccgtgatgccggaaggcgttgagcaccccaggcaggcggtacc

SEQ ID NO: 1341 - DNA, 424 bp, Artificial sequence
  A CRISPR construct for silencing of malF expression in E. coli
ccatgggcaacctggggccgggaggggggaggtgcttgaaaagacgggagtaagttgccggaactgctgggagattcagatgggctgtgccgctcgccgtgatgccggaaggcgttgagcacaatggcgaacaggtattccccttgtgcgtacattgtgccgctcgccgtgatgccggaaggcgttgagcactctaacaacacttcctgcgcacgttcaaaagtcagctgtgccgctcgccgtgatgccggaaggcgttgagcacgggtaatcacgcgcagattcgcgcgttcgccttcggtgccgctcgccgtgatgccggaaggcgttgagcactagagcggctgcgtgccagaaaactggcgcagggagtgccgctcgccgtgatgccggaaggcgttgagcaccccaggcaggcggtacc

SEQ ID NO: 1342 - DNA, 424 bp, Artificial sequence
  A CRISPR construct for silencing of RFP expression in E. coli
ccatgggcaacctggggccgggaggggggaggtgcttgaaaagacgggagtaagttgccggaactgctgggagattcagatgggctgtgccgctcgccgtgatgccggaaggcgttgagcacatgaactgaggggacaggatgtcccaggcgaagggtgccgctcgccgtgatgccggaaggcgttgagcaccggccctcgccctcgccctcgatctcgaactcgtggcgtgccgctcgccgtgatgccggaaggcgttgagcacgccgcgcagcttcaccttgtagatgaactcgccgtgtgccgctcgccgtgatgccggaaggcgttgagcacacgcgctcccacttgaagccctcggggaaggacaggtgccgctcgccgtgatgccggaaggcgttgagcaccccaggcaggcggtacc

SEQ ID NO: 1343 - DNA, 710 bp, Artificial sequence
  A CRISPR construct for silencing of GFP and malF expression, together, in E. coli
ccatgggcaacctggggccgggaggggggaggtgcttgaaaagacgggagtaagttgccggaactgctgggagattcagatgggctgtgccgctcgccgtgatgccggaaggcgttgagcacaagcattgaacaccatacgtcagagtagtgacaagtgccgctcgccgtgatgccggaaggcgttgagcactttccgtatgttgcatcaccttcaccctctccgctgagtgccgctcgccgtgatgccggaaggcgttgagcactttaaaatcaataccttttaactcgatacgattaagtgccgctcgccgtgatgccggaaggcgttgagcacttgaaagatatagtgcgttcctgtacataaccttcgtgccgctcgccgtgatgccggaaggcgttgagcacgggtaatcacgcgcagattcgcgcgttcgccttcggtgccgctcgccgtgatgccggaaggcgttgagcacaatggcgaacaggtattccccttgtgcgtacattagtgccgctcgccgtgatgccggaaggcgttgagcactagagcggctgcgtgccagaaaactggcgcagggaggtgccgctcgccgtgatgccggaaggcgttgagcactctaacaacacttcctgcgcacgttcaaaagtcagcgtgccgctcgccgtgatgccggaaggcgttgagcaccccaggcaggcggtacc

SEQ ID NO: 1344 - DNA, 424 bp, Artificial sequence
  A control CRISPR construct which does not target any gene of interest
ccatgggcaacctggggccgggaggggggaggtgcttgaaaagacgggagtaagttgccggaactgctgggagattcagatgggctgtgccgctcgccgtgatgccggaaggcgttgagcaccatcctggtgcggattccctagactcgtgtccgcgtgccgctcgccgtgatgccggaaggcgttgagcaccctttgaattctcctgaagtgagatgagtaagatccggtgccgctcgccgtgatgccggaaggcgttgagcactcatcccatgctactaatactaggaaggagggacggtgccgctcgccgtgatgccggaaggcgttgagcacacaagccgaattaacgagggggtaggatcccgtctgtgccgctcgccgtgatgccggaaggcgttgagcaccccaggcaggcggtacc

SEQ ID NO: 1345 - DNA, 711 bp, Artificial sequence
  A polynucleotide sequence of GFP targeted by the CRISPR construct
atgagtaaaggagaagaacttttcactggagttgtcccaattcttgttgaattagatggtgatgttaatgggcacaaattttctgtcagcggagagggtgaaggtgatgcaacatacggaaaacttacccttaaatttatttgcactactggaaaactacctgttccatggccaacacttgtcactactctgacgtatggtgttcaatgcttttcccgttatccggatcatatgaaacggcatgactttttcaagagtgccatgcccgaaggttatgtacaggaacgcactatatctttcaaagatgacgggaactacaagacgcgtgctgaagtcaagtttgaaggtgatacccttgttaatcgtatcgagttaaaaggtattgattttaaagaagatggaaacattctcggacacaaactcgagtacaactataactcacacaatgtatacatcacggcagacaaacaaaagaatggaatcaaagctaacttcaaaactcgccacaacattgaagatggctccgttcaactagcagaccattatcaacaaaatactccaattggcgatggccctgtccttttaccagacaaccattacctgtcgacacaatctgcccttttgaaagatcccaacgaaaagcgtgaccacatggtccttcttgagtttgtaactgctgctgggattacacatggcatggatgagctctaa

SEQ ID NO: 1346 - DNA, 1545 bp, Artificial sequence
  A polynucleotide sequence of malF targeted by the CRISPR construct
atggatgtcattaaaaagaaacattggtggcaaagcgacgcgctgaaatggtcagtgctaggtctgctcggcctgctggtgggttaccttgttgttttaatgtacgcacaaggggaatacctgttcgccattaccacgctgatattgagttcagcggggctgtatattttcgccaatcgtaaagcctacgcctggcgctatgtttacccgggaatggctggaatgggattattcgtcctcttccctctggtctgcaccatcgccattgccttcaccaactacagcagcactaaccagctgacttttgaacgtgcgcaggaagtgttgttagatcgctcctggcaagcaggcaaaacctataactttggtctttacccggcgggcgatgagtggcaactggcgctcagcgacggcgaaaccggcaaaaattacctctccgacgcttttaaatttggcggcgagcaaaaactgcaactgaaagaaacgaccgcccagcccgaaggcgaacgcgcgaatctgcgcgtgattacccagaatcgtcaggcgctgagtgacattaccgccattctgccggatggcaacaaagtgatgatgagctccctgcgccagttttctggcacgcagccgctctacacactcgacggtgacggcacgttgacgaataatcagagcggcgtgaaatatcgtccgaataaccaaattggcttttaccagtccattaccgccgacggcaactggggtgatgaaaagctaagccccggttacaccgtgaccaccggctggaaaaactttacccgcgtctttaccgacgaaggcattcagaaaccgttcctcgccattttcgtctggaccgtggtgttctcgctgatcactgtctttttaacggtggcggtcggcatggttctggcgtgtctggtgcagtgggaagcgttgcgcggcaaagcggtctatcgcgtcctgctgattctgccctacgcggtgccatcgttcatttcaatcttgattttcaaagggttgtttaaccagagcttcggtgaaatcaacatgatgttgagcgcgctgtttggcgtgaagcccgcctggttcagcgatccgaccaccgcccgcacgatgctaattatcgtcaatacctggctgggttatccgtacatgatgatcctctgcatgggcttgctgaaagcgattccggacgatttgtatgaagcctcagcaatggatggcgcaggtccgttccagaacttctttaagattacgctgccgctgctgattaaaccgctgacgccgctgatgatcgccagcttcgcctttaactttaacaacttcgtgctgattcaactgttaaccaacggcggcccggatcgtcttggcacgaccacgccagccggttataccgacctgcttgttaactacacctaccgcatcgcttttgaaggcggcgggggtcaggacttcggtctggcggcagcaattgccacgctgatcttcctgctggtgggtgcgctggcgatagtgaacctgaaagccacgcgaatgaagtttgattaa

SEQ ID NO: 1347 - DNA, 8246 bp, Myxococcus xanthus DK 1622
  misc_feature: A polynucleotide sequence of the cas array of the Myxococcus xanthus DK 1622 Genbank AC_008095 RAMP module
atgagaccacgaggaggtgatgtcttggaacgtgccgatgacgaggaatcatctgctgcggcaacaggggcaacgcttcctgaccctgcgccgcgacagcggcggtccgtgcgcggccccgacctgactcgtttctccgtgagcttgagaaccgtgacccacagcttggatggcgcggcgacactccgtcaggtggacgtggtggaacctgtgcgcgtgccagcgctgcgaggccaactgcgtttctgctggcgtgccttgaatacgcacgcttgcgcaagtcccatggaactggcctctcgtgagcgggcgctctggggtggcacaggcggaggcgttgccatctgttcgaaggtagaattcggagggggcatatgcgctgtggcctgcacgagccaccaggacaggctcagcgccaaagcccccagccccatgttggagcgatgggttgtccttcacgcttcatgtcgccgttccatcggaatggctcactgcattcgagaacgcggttcgtgcttggagcatttggggcggcctcggggcgcgcacacgccgctggctgggaagtctgatgctgacctctcagcagtgttgccgcgcacggttgttgatggctcggtgaaccatctggttgctggcattgggactcctggtccccagtcgcgtctcgcactctcttctcaatcctttctcctgctgaaggggcgccatgtcctctctggttctgcctgacccaccttcatccgaagccattcacttgcgccggcgcttcgccaaggggccgaagctggcgtccttcacgctggccttgaagaccttcacgcccatcctgggaggagggccagtggcgcgaagcccggacctcccctccgtggacatcatccgggtccccacgctgcgcgggcacctccgcttctggtggcgcgcgctgtacggccacgcctacgtggggcggggcgcggaggcgctggcgcgtcgggagcgcgagctctggggcggcatggggcgggcgaagaaggggccaggggatgatgaggcgcgtgcctggcgctcccaggtggagttgcgggtgttggacgtccgtcccgagggagaggacacgaagcccatcaacctcggcaccacggcgggttatgcgctgtggccggcgcgcaaggggaagaacgagcaggcagacatccctcgttgggctccgggcctccagttcacgctggaggtcatcgcacccgagggtgaggacatggcccaggtgcgcaacgcggtgcgagcctggattctgtttggggggtatggctcgcgtggccggcgcggctgcggctccgtgtgcctggcggcctcgggccccgttgccgcggagtggctcccggcctccgcggaccgggcatcgcttcggcgcctcttcggggacgtgccgctcttcgcgcctgagcaggcggcggatgcctgtgacatgcctctgctgcggggcgcgcgcctcttccgggggaacgcgggcgccaagccgcgtgacgggagcgaggtctggttgatcgcgctcaagtggctgcgggaattccgccagggcaccgagcccgcgcccgccgggagtgctgaacaggtgggaatcgcgcgcaagcctggtgaaggaaatcgcgcgggccgctccaactggccggaggccgacaagattcgccgcttcgcccggccatctggcaaggacagccgaggcggcttcgctccaaggtccgagggcaaggcctatcccgaggtccacgctccgcgcccacagcactcggcgaccgcggcctggccgcgcgctggcttcgggttgcccattgtcttccatttccagcagaagcggcgcgaggacaatgactactaccagccgaaggagcccgaggacatccagctccagtgggaggagagcggttcggagaagctgatggaccgcctcgcatcgccgctcatcgtcaaggcgctgccgctggcggatggccgcttcgagcccatcgcgctgtggctggagcgcggagcgcctcggggtggacaggtcgtcatgacgcagcgggggacggcagtcccacggacgcgggttccttttgaaagcagcttccgggcccgcgatgaccaaccccttttccagacactccagcaggcggacaacctacgcgacgccttcttctggtggctggaggaaacccgccgtgcccaggaggcgtgagcccatgaaatacgtcgtcgttctcaaagaggggccggtgcagggctacatcgcccagtctcgccgcacgcgggacctctggtacggcagccacctgctgtcgaatctggcgcgaaccgtggcggtctccctcacggagtctggtgcgacgctggtcttcccgcatccggagcaggcgaaggacacgagcaccggcgtggccaacaaggtggtcgcgctggtggaggacgcgcccgagcaggctgcacggaacgcgcggcgcgcggcgaaggagcggttgctcaaggactggcgccgcgtcttcaagacgtgcgagtccatgctcatccccgaggcgtccgtgctggccgaggagcaactcgacaccttccttgagatccacgctgcctgggcacccatcgcggacacgcccacgggttacgccgacgcgctgcacgaggcggagcgtgccctggaggcccgccggggcttgcgtgagttcgtgccatggaagcagccgccgccggcgggcacgcacaagtcgagcctcgacggcgctcgcccgtcattgctgcgacgcgagcgtcacgtggggcacctctggcgtgacttccgcattggcctgcgcgaggagctggatgcgctcggggtgctcaagcgcgtcggcggcaatcccggccagttcgtgcccgtgccctccatcgggatggcggcgtggctccagaccgcggccacgcgacacccggcgctcctcgccgcgctcaaggccgagtgcgcgcgccgcgggttccagacggtgagcgtgaggaatcgtccctgggtggaggccttcccctacgacggccagttgttgctgcccgagcgcgtggccccgtacttcgaggagtacgccgtccccgatgcgcgtcaggccgccgcgcgtttcgtccacgagttcgtggagccgcttcgagacgctgtgcgcgccgagcccttcccttacgtggcctgcctggtggcggatggagaccgcatgggccgcgcgctggaggcgctcgcgaggcagccggacggccacgccgcgcaccaacgcatctcccgggcgctcgcggacttcacgcggcaggcgaagacgattgtcgaagtggagcatcggggcgtgctcgtctacgcgggcggcgacgatttgctcgccttcgtcacgcccatggacgcgctcgcgtgtgcccaggcgcttgccgttgccttccgcgccacgctggaagcggcgctggcgggaacgcgcgcggaggtgcccacgctctctgtggggctgggcattggccacgtcctggagagcctgggcgagctgctggagctgggccgccgggcagagcgtgccgcgaaggacgcgggtcgcgacgcgttggcagtgctggtggcgaagcacgccggacgtgagcggctgtggacggcgccgtgggccaccgaccccgtcgagcggctgacgcgggacatggcgctgctgtcgagcgacacccagccgctgcccttgaagaaggttcatgaggtggcggccctcgcgcgccgcttcccgtctggcaccaccatcgcgcccgagctggctgagctgctgtcggatgaggccgcgcgcatcctcgcccgggcggaggcggggcgttcgcccgtgaagctcaccccggaggccgtgggcttggagctgcccacgtcgccgaactccctcgagccaccccatgcatcgctggaccgatgggcatcccggctgctggtggcggatgtcctcgcccgggccagcggaaagctcattcccgcgagcgacaaggaaggtgtgagatgagtgacgcgagcttcgcgctgctgccgcgtgacggcctgtcggccaaggacgggcgaggttggtacacgtcggaggtggggcgtgggtactccttgccgtggcccctgcccaccacagtgcggggcgcccttcgcgccgcctgggggcatgacgccatggcggtcagcggtgcggtcctggccccggatgaatgggagcgctgctcagaggaggtccggttgcggcacctcgtcgcgctgcgccgcccgttgggcgagtccttctcgttggcccaccgcatgtggccgtttcccgcggatgctgtgtgcgtgcgcgacgcggacgggtccgagcatctggagcggttggagccacgcccggatggggccgccacgctgggcccggatgacgacgacgcgcgcgaggcgctgtggcacccgcgccggaactcgagcggaaagcccatggccgcgcccctgttctggcccgaggcgcggatgatggcgtggctgcgcggcgcggtggagccgtcctccgagacaccggatgcgctgaccccgcgcacggacatccacctggccatcgacgtggagacgcaggcgtcgcaggactcgatgctgcactctcgtgaggtggtggagttgctgcgcctccagcgccactcggggcgaactcccgtgctggaggagtgggcgctgggactgagctgcgcgtggccggcccccgcgagcggcgctccgcgcgggccgctgggcctgggcggccggcgccggctgtcggccgtggagccactgaaggtggacctcttcgcgattccggatggcgtggcccgggcgacgcgaggactgcgcctggtgctggccacgcccgcggagttccaacgtggctggttgccggacggcttcgagcgcgtggctgggacacccccacgttacgtgggccggctgccgtgcatcgacgcgcccgtggtgcttcgggccgcgctggtcccctggccgctggacgtgtccggctgggacatggtgcggcggcggccccggcccacgcggcggtgggtgcccgcaggcgccgtctacttcttcgagaaacacagcggtggggacttcaccgccaacgagctgcgagcgctgtggctggcctcctggggcggcggccacgcggaggcgctgggccaggtgctgcccggcgtgtggcaaccgccccgtcacggacaaggagcctgagcatggagagccgaccctatcttcttcacgcgctgtccccgctgcacgtcggcactgggcagagcgtgggtgtcatcgacctgcccctggcgcggctgaaggccacgggaatccccttcgtcccaggctcgtcgctcaagggcgtgctgcgtgaattgcggcggcctcgcgaggagacgggcgacgcgcgagggctgcacgacgccgtcttcggcccccggcgggcgaaggcgggtccggagggggacgagccgggggactacgcgggcgcgctggtggtgggggacgcacggctgctcgcgctgccggtgcgcagcttcgtgggcaccttcgcgctggtgacctcgcccatgctgctcgcgctcgcgcggcgggacctgggcgggctgagcgggaaggagggggcctggccgaaggtggagccgctggcccagcgcggcgcgcgcgtggcgtccctgcgagacagcgccgtcgtgtacggcgcgggcacgtcggaggcttgcgtgtacctggaggacctggacctgcaggtggcctcgaaggatgacgcggctctgggcgcctgggcccagggcctggcggggctgctgccggaggcggagcgcgcgctgctgacgaagcggctggtgctggtggacgacgagacgatgtccttcctctgggagacagccacacaggtggacacgcgcgtgagcatggacccggagacgggcaccgcggcaaaggggcagctctggacggaggagagcctgcccgcggagacgctgctggtgggcgtgatgggcgccacgggtaccttcaacaaggcgccgcgcaagttggcggcggacgcggtgctggatgcggcgtttggcggcgagggcacggtgctccaactgggaggcaaggccaccgtggggcgcggccggtgccggctgctggcctggatggctccggatgcgcgaggtgggcgatgacggcgcagacgcgggagcagcagcgggcgctggatgtctatgcgcgggttcgcacggcgcgtgacaaaggcaaagcgttgtgcgcggagtacaagcctcgggtgaacggcctgggcgcggcggtgttgcgtgatgggctggcggcggcgctcgccttcctggaacgagaggtcaagagcaacgcggcggcccagcacctgttggaagacctgacgtggtgtctggagcgggcgcggttgccggggttgtcggagccgtccctgaagaggctgggcttgcctggcgccgtccgcgcgctggggctgaacgaatacatgctggccacgcgcgagtcgctccggctgttggtgtggttccgccgcgcggtgcaggccaccttccccctggaggagcgcgaacatgcgtgacgctttgggccgagtcgcggggcgcgtcgagaagacctcgcacgcggggctggtgtacgagcggtatgccccggagaagaagcatgagagccagagcggaccctgggaggcgtggctggctcgtctggaggcgcaccccgagccagacgattacgccgacgccttcattcgctggaaggactcgctccggcagtcgtacacggcgaccttcacggcgcgcgcggagagccgcctcttggtggggcatggcaacgcgtcacccacgggggtggggctgacgctgcaccacacgtggggcgtccccgtcgtgccgggctcgtcgttgaagggcgtgctcgcgggctacctgcgcgcggtgtacggcgatgccgcgatggaggcgcggcgcaggctcttcggtgtgccgggggaggatggcgaaggcgcgcacgctggcgaggtcatctttcatgatgcgcagtgggtgccgtatcggcgtgtcacgggcgcggaccgttcgccgacgttcctgtcccgggacgtgctcacggttcaccatgcgggttggtatggcggcacgtcctcgtggccgaatgactacgagtcgcccaatccggtggccttcctctcggtgcggccacgaggttgtttcctcgtggcgctgagcctggcgccagggatggaggcggatgcacaggcagaggcgttcctgaagtggaccgcgcagaggctggacgaggccctgcgccactggggcgtgggcggaaagacggcggcggggtacggcaggctggtgcgcgaagggccgttggagcttcagcgtccccagcgcccggtccgcgcctcgcccgcgctgacggagttcctgtcatgggtggaggctcggcgcgccgacaaggtggaacaacggcaagtcctggtgggcttcgaggcggagtggctggagcggttggtgtcgctggcgccggaggcgcgtgaggccggtgcgaaggcgctgcgttcactcgtcaagaaccccaagctcgaagcgcgcagggatgagttgctcgcgaggatgggcgtggccgtgggaggtcgtcggtgacgtcactcgacctgctctatccggtccggggtggcccggtgccgctggaccatgggtatgcgctcttctccgcgctttgcacccgggtgcccgcgctgcatgaacgcttggacctgggcgtattcacgctgcgcggtgagcgcgccgtgggggacctgctgcacctgggccggggaacgctgcgcttgcgctgttcaccggaggtggtgccgctgctgctgtcgttgccgctcacgccactgaacgtcgctgggcgggaggtggtgctcggtgcgccggtgctccgcgcgttggaacccgcgtcgtcactcttcgcgcggattgtgactttcaagcatgcgctcgacgcggcgtcgttcctgcggggcgtgtcccgttcactcgaggcgctggcgtgtgatgcacgtccggtgctgggccgtcggcggctggtgcgtatcgccgggaagcgggtggtgggttacgcgctcgagctgcatggcgtttctggagaggactcgttgcgagtgcaggcacaaggcctgggcgggcgccgccacatggggtgtggcttgtttcttccgccgcgtcccgtggtgcggggcgttgtgccgcagctcggggaactcgcgcgggccgcgtga

SEQ ID NO: 1348 - DNA, 8126 bp, Myxococcus xanthus DK 1622
  misc_feature: A polynucleotide sequence of the cas array of the Myxococcus xanthus DK 1622 Genbank AC_008095 CRISPR Tneap system
ttggcgcggagcgtcggttggcggcgctccgcgctgattactgtttctggatgtgtgattttgaactggtggggaaatctaatggtgtttgttgacctgctgttccccgtgcagggcggcccggtgccgctcgaccatgcctatctgctgttctccgcgctctcccgtcaccttcccgcgctgcatgagcgctcggatatgggcgtgttctcgcttcgaggtgtgagcaacacgcgggagttgctttacctggggcgaggcacgatgcgcctgcgatgccccattgaggccgtggccacgttgctgccgctggtgagcgcgccgctggagattgctgggagacgcctgtccctgggcgcgccctcgctccatgcgctggagcccgtgccctcattgttcgcgcggctggtcaccttcaagcacgcgatggacgaggccgcattcgtcgcggcggcctcccgcgcgctggaggcgcttggcgtccaggcgacgctgaaggtggggcgccggcgcatcgtgcgcataactggaaagaaggtcgtgggcttcgcgctcgaactccatggcttgtcggccgagcactcgctgcgcgtgcaggagcagggaatgggaggccgccgtcacatgggatgtggcctcttcctcccgcccggccgggcggcgcgtgtccagtcccatgggaaggccgcgtgaagcggctgctggccaaaagcacggccacgcccgacagacccgagggcgaggccacgctgctgggacacaccgccctagtcctgtccgccgcgcgccggctcctggagcaccgtgggcgcgcgtcgctgctggccgcgggcctggacccggcgttggagccccggctgcggcgcatcgtcctgctggccgccgcgctccatgacctgggcaagtgcagcgagcacttccaatccatgctgcgccgccagcgcgaagcgccgcagcttgtccgtcacgaagcgctctcgctgtggctctgctggccagggcagccgctctccgcatggctccagcgggacgtgagcgagctggacctgtgcctggcgctggtctgcgtggccgcacaccaccgcaagttccagacagaggccttcgcgcccgacggcaccggagcggggctgtcgctggagttgcgggtccagcatgaagacttcgcccggacgctggggcgcatcgccgaggagttggcgctgtccgctccgccactgttcacggcgcccatcgtgcttcgagccacgcggaaggagcacccgcgcgaccaactccagtcgtggcaggacgacttcgagcggacggtgcccgccggctccgtggacgcgcggctcctggccgtgtgcaaggcgttggtgctcgcggcggacgtcgcgggctcggcgcttccccggagcggagagaagcaggactgggtggatcgtcagctcacggcgccccatcccgcagaggccctgcgcgccgtggtcgagcgccgcctcgcgggacacacaccgcgaccgttccaggaggaggtggctcgcagcgccgcgccgctgaccctggtccgcgcgggctgtggcagtggaaagacggccgctgcgtacctctgggccgcaagacagcacccaggccgtccgctgtggctcacataccccacgatgggcacggcgacggagggcttccgggactacctccacggcgcggacgtggaggcccgattgcagcactcacgcgcggaggtggacttcgacatcttcggactccgcgacggcgcggcgcctgggacgagctcccgcgaccaggaccggctcgacgcgctccgctcctggggcgccgatgcgatgagctgcacggccgacacggtgctcgggcttgtccagagccagcggcaggggctctatgcctggcccgggctctgtgcggcctgcgtcgtcttcgacgaagttcacgcctatgacgaccggctcttcggctgcctgctgcgcttcctggaagccctgccgggaatccccgcgttgctgatgaccgccagcctgcccgccacgcggctcgacgtgctgcgcggcatgtgcgagcgcgttcatggccggagcctcgcggaggtcgaagggccggaggatttggagacactgccgcgctatcagcggctggacgtcgcggagccgtgggccctcgtggcggagtgcctgcgggaccacggcaaggtgttgtgggtcagcaacacggtggatcgctgcatgcggaccgccgaggccggcacgtcgcacggtgcgcgtgcgctgttgtaccacagccgctttcgttacgaggaccgcgtccgtcgtcatggtgacgtcatcgaggccttcgccactgagggccgcgcggcgtttgcttcgacgacgcaggtcgcggagatgagcctggacctgtctgcggacctgctcgtcacggatttggcgcccatcccggcgctcatccagcgcttggggcgcctcaaccgccgcagcactctggagcggcccgcgccagtgcggcctttcgtggtgctccccttcgatgggccgccctacgccgcgccggacctgcgcgacgcgcgtgcatggatggagcggctgggaacggggccgctgagccagcgggacctggtggacgcatgggggccgcccgggatgatggatgcgccgcggcggcagtccagcacctggctggatggacgcttcgacacctggcccgctccgtgccgagacggaagccccagcctcacggtcctcttggaagaggacgcccgtgctgtcctggacggagcggtgagcgctcaccgggtcaccctgcccatgaacctgccacccgagtccttcaagtggcgtgcatggccccgcgcgggccggctgccataccccatccctccagcgaacgcgctggactacgacggcctgcgaggtgcgcgatggcgaaagccgtgaacccacggaagaaggccttgcccgctccgctctccatccggttgtacgcaccagggatgacgccgctgctgcgcgcgggcgcgggcgggttggcggcatcgctccgcgccatcctcgggagcgcttcacccgccgcgccgtggccctctccggtgcggctggggcccgggacggcgacggtggagcaggaggccatccacctggactggggcggcaaggcaccggaggccacgctccgggcgctgttcggcgcgtcattccgggtgaagcagggcttcatcgacctgccgggcacgcgtccacccggagcgccggagccaccgcccgagttggccgccgcgctccacgacgcgctcaaggtgacgttcctccagcatggcaagtcgacgcagggaggcgcgcgaaggcgcgtcactttcgaggtggacgcgcggcccgtcatcgtcgagtcccagggctacgactccttcgtccaccagacggcctggcagagcgtgctcgaggcgctggaggtgggctcgacgtcgttggcgagctgggcctatccgggcgcggccgagcggcacatcggtgtgcgcgtcaccaaggtggaatacacggcggcggaggcgctctgcgcgtgcttcgcgctggtggggtgtgtttcctacaagctgccgcagctccggggcggggccttcgtggcgctggcgccgacgaacctggtccgcttcgcggagctgcgccctgggctgacgcccaagcggctccgtgacgtggcggtggcgggggcgtcggacgcggtgctcgcggctcagttggtgatggcgcaggaggcggggaagaagcggctgggggccgtgctggggaccaccgaggccgtggcgctgcggcagatgccatggaacgcgcagcagaagattcgcggcgcggtggtgcggcaggacgccgtgctcgaggaggtcctggaccgctacgaggccgccgccgccgcgctgccgcacacgctgcgagtccgcaagcccgagggcaaggcgacgggcgaggcgagctacttcatcgcgatcagtgcgctgcgcgccttcatcacggagaacctcgcggcttcacgcccctggtacgcggacttcgccaccgcgacgacggcggagggccgcttcattcacgactaccgcgaccgggacaacctgggcgcgctgctgtggcacgaaaggaagggactcatcgccatgcatccgtacctgggagaggccgagcagtggctcgtccagagcgttcacctcgcgctccggagccggttcaagagcatttatgcggacacgaaggagagcgccccggccacacgctccaaccggctcaagggtgagcgtgagcgattgcggctgagcttcgcgggggccaagacgccggagcaggtgcgcgcggcgctcgcggacctgtggagccgcgcgggcaccaaccgtgagctccaggagcattggcgggacatcctccaactgctggggcccgagcggtggcgcgcggcccgcgacctcgcgctggtggcgctggcgagctaccagggcaaggggggcgaggccgcggaacttgaggacgcggacgaggccgctggcgcgtccgagcagtcttgagcagctccacacactttcccggagtccattcatgagccttcacgtcttcgccgccttcgtcacgccgctgggaaccgccgccaacaaccggggcctcaccgagggaaacatcaccagcctccagaagctggtgtggaacggacaggtccacaccaccgtctccgccgagtccatccgcttcgccttgcggcggcgcttgaatgagcaggagccatgcaaccgcacttatgacgatgcgtcgcgcgccaacgcgtggaaggacgccgccttcagcgcatggtcggggaagtcgaaggagaagacctatatcgatgatgacctgctgggcttcatgtccgcggagggtgcgaagcaggagaaggagaagggcacggcgaaggtccgccgcgcggtgctggaggtgtcccgggcggtgagcctcacgccgtggtccggggacgtcaccttcaacgccgcgagccccggggccacgccctccgcgcagaagaagggcagcaaccccgtgccgtacgggacggagatgcacgcgacgcgctaccagtacggcgtggcgctgacgccggaggcgctgcgagtgccggcccgtgccgtgacggcgctgaaccagctctgcgcgctggggcctgtcgcgggcaaccacggccgcttcctcttcgacttcagtccggagtcggtcgtcttccggctcacccaggaggccgcgccgcgcatcctgtatgccttcgagccgtcctcccgcgcggggggcgtggagctcgctgcgctgctgcgcaaggtgaagagcggcgacgtccccgcgaaggagttggtgttgggcgggcaggtggtggaggggctgggcgccgaggagcgcgaggtgctttcgggcgcggagctccacacgggcgtggtcgccgcctgccgcgcggcgtgcaagcggctggaggtgaggaagaagtgatcgcgctcgaactgtccgtgcccgtggcgtgctggcgcaagggccgggcgcgcgagctggtggagaccgaggtcctgccgccgcccgcgacgtgctacggcgcgttgctctcgctcgtgggtgagcaggaccgggagcggcaccggggctgccgcgtgacggcgggtgtgttgaacgcgcctgtcatcagcacggtgcttcgcaccttctggcggtcgaagaacctgaaggtcgcgaaggggaatgacgagaacgccgcgccggaccagcaacagctcgtcatcgacgcgcgcctggtggtctggtgcgacagccgggaggagccggactcgggtgaatcgctggaggaccgtgtcgtccgggcgatgcgtgagcctggctccgtgacgcgggccggggggtggtcgctcggggagtccacgcacctcatcaatgacgcgcgtctgctcccggaggggcggccgccagcgggctgtcgggccttcctgaccgcgtccaccggcgctctcaccctgccggtctgggtggaccacgtgggcactcgtggcactcgttacgaggtggggcggctcgaagaggtcttggctgctcccgaggtccaacggcttccgcgcatcccgctcgcggagggcgctggataggtgtctgtcgttgtcacgcggtaccggggcggggggccccaatacatgaacgcatcatccacgagtccgaagcctgtcgtcggcgagccgtccatccgcacgcacgcgctgcatgcgctggcgtactgcgagcggctcttctacctggaggaagtggaggagttgcgcgtggcggacgccgccgtgttcgcgggacggcggctgcacgtccaactccaggaggaaggcgagcacgtcgagctggaactggcgagtgaggcattgggcctgcacggaagggtggacgcggtgaagacgcgggaggggacgctggtcgtctacgagcacaagcgcggacgccatgcgcctggaggggatgcgccagaggcgtggccgagcgatcggctccaggcgggggcctacgcgctcctggtggaggagcgcttcccgggggcgcccgtggagtgccgggtccgctaccaccagacggacacgacggtgcgcttcccgttggacgcggcgctgcggggcgccgtggtggcggccgtggcgcgtgcccggctgctgcgtgcgtcgcgggagaggccgcccgtgacacaggaggagcgcaagtgtgcgaagtgctcgctggcgcccgtgtgcctgccggaggaggagcggcaggtggtgggggaggagcggccccggctctttccggaggatgatgtgcggcaggtgctgcacgtcgcgacgcctgggacgcgggtggggcgcgcggcggaggagctggtggtgacgccacccgaaggggagggcgcgccgtcgaggcagcccgggcgcatggtgtcggcgctcatcgcgcatggagcggtgcaggtgagcgcgcaggcgttggcttactgcgtggagaacgacatcggcgtgcactggttcacgtccggggggcgctacttggggggattgggtggtggggcgggcaacgtccaccggcggttgcggcagttcgaggcgctacggcaggcgtccgtgtgtctggggctcgctcgccgcttggtggcggcgaagctggaggggcagctccgcttcctgcttcgcgcctcgcgcggtgattcggagtcgcgtcaggtgctggcctcggcggtgcgggacctccgggcgttgctgccgaaatgcgaggaggcgccgtcgctggaggtgctcctggggttggagggcgcgggcgcggcgcggtacttcggagcgctgccgtaccttcaaggcgaggacgtggacacgcggctgcgcttcgagggccgcaaccggcggcctccgagggaccggttcaacgcggtgctcggcttcttgttcggacttgtccaccgtgaggtggaggcggccattcgggcggtggggctggatgtggcgtttggtttctaccatcagccccggggcacggcggggccgctgggactggatgtgatggagctcttccgggtgccgctggcggacatgccgctggtggcctcggtgaaccggcgggcgtgggacgcggacgcggacttcgaggtgacgtccgagcacgtctggctcagcaaggcggggcgggcgaaggccatcgagctgtacgagcggcgcaagcgggagacgtggaagaacaacgtgctggggtactcgctcagctatgcgcggctggtggagctggaggtgcggctgctggagaaggagtggaccggcaagccggggctgttcgcgacgttccgcttgaggtgagccatggccgagccgaggcgttggtatttgattacctatgacatccgcgaccccaagcggtggcggaaggtgcatgccctgctgaagggatacggagagtggctgcagctctccgtgttccgctgctcgctgacggaccgggaccgggagaagctgcgctgggagctgtcgcggcggatggacgccgtggatacgttgctggtgattgggctgtgtggcgggtgcgtggagcgcgtgcgcgccatcaacgcgaaggaggactggccggaggagcccgcaccgttcaaggtgctgtgag

SEQ ID NO: 1349 - DNA, 6121 bp, Myxococcus xanthus DK 1622
  misc_feature: A polynucleotide sequence of the cas array of the Myxococcus xanthus DK 1622 Genbank AC_008095 CRISPR Tneap system without the cas1 and cas2 genes
ttggcgcggagcgtcggttggcggcgctccgcgctgattactgtttctggatgtgtgattttgaactggtggggaaatctaatggtgtttgttgacctgctgttccccgtgcagggcggcccggtgccgctcgaccatgcctatctgctgttctccgcgctctcccgtcaccttcccgcgctgcatgagcgctcggatatgggcgtgttctcgcttcgaggtgtgagcaacacgcgggagttgctttacctggggcgaggcacgatgcgcctgcgatgccccattgaggccgtggccacgttgctgccgctggtgagcgcgccgctggagattgctgggagacgcctgtccctgggcgcgccctcgctccatgcgctggagcccgtgccctcattgttcgcgcggctggtcaccttcaagcacgcgatggacgaggccgcattcgtcgcggcggcctcccgcgcgctggaggcgcttggcgtccaggcgacgctgaaggtggggcgccggcgcatcgtgcgcataactggaaagaaggtcgtgggcttcgcgctcgaactccatggcttgtcggccgagcactcgctgcgcgtgcaggagcagggaatgggaggccgccgtcacatgggatgtggcctcttcctcccgcccggccgggcggcgcgtgtccagtcccatgggaaggccgcgtgaagcggctgctggccaaaagcacggccacgcccgacagacccgagggcgaggccacgctgctgggacacaccgccctagtcctgtccgccgcgcgccggctcctggagcaccgtgggcgcgcgtcgctgctggccgcgggcctggacccggcgttggagccccggctgcggcgcatcgtcctgctggccgccgcgctccatgacctgggcaagtgcagcgagcacttccaatccatgctgcgccgccagcgcgaagcgccgcagcttgtccgtcacgaagcgctctcgctgtggctctgctggccagggcagccgctctccgcatggctccagcgggacgtgagcgagctggacctgtgcctggcgctggtctgcgtggccgcacaccaccgcaagttccagacagaggccttcgcgcccgacggcaccggagcggggctgtcgctggagttgcgggtccagcatgaagacttcgcccggacgctggggcgcatcgccgaggagttggcgctgtccgctccgccactgttcacggcgcccatcgtgcttcgagccacgcggaaggagcacccgcgcgaccaactccagtcgtggcaggacgacttcgagcggacggtgcccgccggctccgtggacgcgcggctcctggccgtgtgcaaggcgttggtgctcgcggcggacgtcgcgggctcggcgcttccccggagcggagagaagcaggactgggtggatcgtcagctcacggcgccccatcccgcagaggccctgcgcgccgtggtcgagcgccgcctcgcgggacacacaccgcgaccgttccaggaggaggtggctcgcagcgccgcgccgctgaccctggtccgcgcgggctgtggcagtggaaagacggccgctgcgtacctctgggccgcaagacagcacccaggccgtccgctgtggctcacataccccacgatgggcacggcgacggagggcttccgggactacctccacggcgcggacgtggaggcccgattgcagcactcacgcgcggaggtggacttcgacatcttcggactccgcgacggcgcggcgcctgggacgagctcccgcgaccaggaccggctcgacgcgctccgctcctggggcgccgatgcgatgagctgcacggccgacacggtgctcgggcttgtccagagccagcggcaggggctctatgcctggcccgggctctgtgcggcctgcgtcgtcttcgacgaagttcacgcctatgacgaccggctcttcggctgcctgctgcgcttcctggaagccctgccgggaatccccgcgttgctgatgaccgccagcctgcccgccacgcggctcgacgtgctgcgcggcatgtgcgagcgcgttcatggccggagcctcgcggaggtcgaagggccggaggatttggagacactgccgcgctatcagcggctggacgtcgcggagccgtgggccctcgtggcggagtgcctgcgggaccacggcaaggtgttgtgggtcagcaacacggtggatcgctgcatgcggaccgccgaggccggcacgtcgcacggtgcgcgtgcgctgttgtaccacagccgctttcgttacgaggaccgcgtccgtcgtcatggtgacgtcatcgaggccttcgccactgagggccgcgcggcgtttgcttcgacgacgcaggtcgcggagatgagcctggacctgtctgcggacctgctcgtcacggatttggcgcccatcccggcgctcatccagcgcttggggcgcctcaaccgccgcagcactctggagcggcccgcgccagtgcggcctttcgtggtgctccccttcgatgggccgccctacgccgcgccggacctgcgcgacgcgcgtgcatggatggagcggctgggaacggggccgctgagccagcgggacctggtggacgcatgggggccgcccgggatgatggatgcgccgcggcggcagtccagcacctggctggatggacgcttcgacacctggcccgctccgtgccgagacggaagccccagcctcacggtcctcttggaagaggacgcccgtgctgtcctggacggagcggtgagcgctcaccgggtcaccctgcccatgaacctgccacccgagtccttcaagtggcgtgcatggccccgcgcgggccggctgccataccccatccctccagcgaacgcgctggactacgacggcctgcgaggtgcgcgatggcgaaagccgtgaacccacggaagaaggccttgcccgctccgctctccatccggttgtacgcaccagggatgacgccgctgctgcgcgcgggcgcgggcgggttggcggcatcgctccgcgccatcctcgggagcgcttcacccgccgcgccgtggccctctccggtgcggctggggcccgggacggcgacggtggagcaggaggccatccacctggactggggcggcaaggcaccggaggccacgctccgggcgctgttcggcgcgtcattccgggtgaagcagggcttcatcgacctgccgggcacgcgtccacccggagcgccggagccaccgcccgagttggccgccgcgctccacgacgcgctcaaggtgacgttcctccagcatggcaagtcgacgcagggaggcgcgcgaaggcgcgtcactttcgaggtggacgcgcggcccgtcatcgtcgagtcccagggctacgactccttcgtccaccagacggcctggcagagcgtgctcgaggcgctggaggtgggctcgacgtcgttggcgagctgggcctatccgggcgcggccgagcggcacatcggtgtgcgcgtcaccaaggtggaatacacggcggcggaggcgctctgcgcgtgcttcgcgctggtggggtgtgtttcctacaagctgccgcagctccggggcggggccttcgtggcgctggcgccgacgaacctggtccgcttcgcggagctgcgccctgggctgacgcccaagcggctccgtgacgtggcggtggcgggggcgtcggacgcggtgctcgcggctcagttggtgatggcgcaggaggcggggaagaagcggctgggggccgtgctggggaccaccgaggccgtggcgctgcggcagatgccatggaacgcgcagcagaagattcgcggcgcggtggtgcggcaggacgccgtgctcgaggaggtcctggaccgctacgaggccgccgccgccgcgctgccgcacacgctgcgagtccgcaagcccgagggcaaggcgacgggcgaggcgagctacttcatcgcgatcagtgcgctgcgcgccttcatcacggagaacctcgcggcttcacgcccctggtacgcggacttcgccaccgcgacgacggcggagggccgcttcattcacgactaccgcgaccgggacaacctgggcgcgctgctgtggcacgaaaggaagggactcatcgccatgcatccgtacctgggagaggccgagcagtggctcgtccagagcgttcacctcgcgctccggagccggttcaagagcatttatgcggacacgaaggagagcgccccggccacacgctccaaccggctcaagggtgagcgtgagcgattgcggctgagcttcgcgggggccaagacgccggagcaggtgcgcgcggcgctcgcggacctgtggagccgcgcgggcaccaaccgtgagctccaggagcattggcgggacatcctccaactgctggggcccgagcggtggcgcgcggcccgcgacctcgcgctggtggcgctggcgagctaccagggcaaggggggcgaggccgcggaacttgaggacgcggacgaggccgctggcgcgtccgagcagtcttgagcagctccacacactttcccggagtccattcatgagccttcacgtcttcgccgccttcgtcacgccgctgggaaccgccgccaacaaccggggcctcaccgagggaaacatcaccagcctccagaagctggtgtggaacggacaggtccacaccaccgtctccgccgagtccatccgcttcgccttgcggcggcgcttgaatgagcaggagccatgcaaccgcacttatgacgatgcgtcgcgcgccaacgcgtggaaggacgccgccttcagcgcatggtcggggaagtcgaaggagaagacctatatcgatgatgacctgctgggcttcatgtccgcggagggtgcgaagcaggagaaggagaagggcacggcgaaggtccgccgcgcggtgctggaggtgtcccgggcggtgagcctcacgccgtggtccggggacgtcaccttcaacgccgcgagccccggggccacgccctccgcgcagaagaagggcagcaaccccgtgccgtacgggacggagatgcacgcgacgcgctaccagtacggcgtggcgctgacgccggaggcgctgcgagtgccggcccgtgccgtgacggcgctgaaccagctctgcgcgctggggcctgtcgcgggcaaccacggccgcttcctcttcgacttcagtccggagtcggtcgtcttccggctcacccaggaggccgcgccgcgcatcctgtatgccttcgagccgtcctcccgcgcggggggcgtggagctcgctgcgctgctgcgcaaggtgaagagcggcgacgtccccgcgaaggagttggtgttgggcgggcaggtggtggaggggctgggcgccgaggagcgcgaggtgctttcgggcgcggagctccacacgggcgtggtcgccgcctgccgcgcggcgtgcaagcggctggaggtgaggaagaagtgatcgcgctcgaactgtccgtgcccgtggcgtgctggcgcaagggccgggcgcgcgagctggtggagaccgaggtcctgccgccgcccgcgacgtgctacggcgcgttgctctcgctcgtgggtgagcaggaccgggagcggcaccggggctgccgcgtgacggcgggtgtgttgaacgcgcctgtcatcagcacggtgcttcgcaccttctggcggtcgaagaacctgaaggtcgcgaaggggaatgacgagaacgccgcgccggaccagcaacagctcgtcatcgacgcgcgcctggtggtctggtgcgacagccgggaggagccggactcgggtgaatcgctggaggaccgtgtcgtccgggcgatgcgtgagcctggctccgtgacgcgggccggggggtggtcgctcggggagtccacgcacctcatcaatgacgcgcgtctgctcccggaggggcggccgccagcgggctgtcgggccttcctgaccgcgtccaccggcgctctcaccctgccggtctgggtggaccacgtgggcactcgtggcactcgttacgaggtggggcggctcgaagaggtcttggctgctcccgaggtccaacggcttccgcgcatcccgctcgcggagggcgctggatag

SEQ ID NO: 1350 - DNA, 35 bp, Artificial sequence
  Single strand DNA oligonucleotide
aaaaagatctgatgagaccacgaggaggtgatgtc

SEQ ID NO: 1351 - DNA, 31 bp, Artificial sequence
  Single strand DNA oligonucleotide
ttaattaacaccggcaagccttcacgcggcc

SEQ ID NO: 1352 - DNA, 28 bp, Artificial sequence
  Single strand DNA oligonucleotide
cggatccgttggcgcggagcgtcggttg

SEQ ID NO: 1353 - DNA, 21 bp, Artificial sequence
  Single strand DNA oligonucleotide
aagctttcacagcaccttgaa

SEQ ID NO: 1354 - protein, 311 aa, Artificial sequence
  Neisseria sicca  derived Cas6  protein sequence
MNPLNLPSELPIARYRLHFTLTHDLQLPPYAASTLRGVFGHALLAAACTCDTPQTPHLPDCPYAQIFEPAPCADLPSSVRQSPPPPYLIETPLIAPTHFPAGADYAFDLVLFGRARHSLPLIAAVFTQAFARGLGANNAGKGELSGIAVQQADGSFLTISERGSPIALHDNHIRLPERYPTQACIQLLTPLRIQQKGRILRETELTQAVFLRQLMRRYLTLAHLNWGNHANAAELSAQIGGQGVPPRLSWHEHRRFSNRQKQITPLSGAIGTWELTGLTPAFSQMLYIGQWLHLGKETVFGNGQYRIIQAA

SEQ ID NO: 1355 - protein, 379 aa, Artificial sequence
  Neisseria sicca  derived Cmr1 protein sequence
MALLIPDFGPMEKLPESKEAWQEIYCELVTPIYGGGVQAAMPDVLMPIRATAIRGQLRFWWRLLAQQKWNLKEKSLREAEFRLWGGIGEEAAASLVFLRVLDVLNVKQISYFQGSLDSSLPSDKKVRSKSKSNDLKPYAYVLFPMDSEEKREKTLLIKEGLTWTLQWRLSEKANETDREQVLETLRWWVNFGGIGARTRRGCGAFVVKDSSNPVFKQPLSIDEVMKAGCKLVLRTSTNHALLAWKEAVQRLRDFRQGVGIGRNHPSSDTTKPAGRSRWSEPDEIRRITRTHSDRHKPEHPAGDLFARGVFGMPIIFHFVGGDEPADTTLQPKRKERMASPLIIRPVWDGKGGFQAAALSLPLDKVLNVSAELLEKNKIR

SEQ ID NO: 1356 - protein, 583 aa, Artificial sequence
  Neisseria sicca  derived Cmr2 protein sequence
MAKAAAKSLFEAGAQMVFPFVDETTKDRLEPCDRMDNNFSVGNKIQVQVEAADDAAVRDLVEQAKAAAQSRFETIARQARQDLNAALRDEIWQMQLNDYLEIQAAWARITEKGYSDASQRAASALAARKATRDFTPAHAADAWDNRFMLPKSSLDGARETVLLEKANGDADLSDVARRKLGLSRSEQLDCAGIVKRLGGNSEQFTPVTRVAADAWLQGLPENELSKLCDAYEPLIALNLATRVKGNQGIYSDFPFDGQLLYRNRLDAALSDNKNSADASEKLSKLKNVLKTIWHKYGEPCSYWAMLLADGDRMGELLDRAKTIEEHQAITEVLSTFAESVPAKMRDFRAQCVYAGGDDVLGFVALDKAVGCADALRQAFSDSLKKVSDVLKAEKTPTLSVGLAICHISTPLGNVRRLAKHAEKVAKGDNYPADQQRNGLGITLSVRSGSDSDWRVQWSDEAGLAAFKKWQNRYQKKEISSRIAYDSRDIFMRTDFPKSADLSFELHQNIRQAEFTRMLDRARNMSGGELKDDVKKELKARLDALQRQLGSEHTGALNIFATELIIARWLAAKTQNDLGQEAQS

SEQ ID NO: 1357 - protein, 387 aa, Artificial sequence
  Neisseria sicca  derived Cmr3 protein sequence
MNSYFLDALAPLVFRSGKPFGSQSDTDDIQFPPPSAAAGLVRTQIMGQSGCDWDSKTQGNRAKLSDAQVDELRQIAVQGAFLAKQDISDDLRILLPKPANALYLKNKETDKTELVRLAPQAFGSDTAADFPQADLLPVQIQSSIKGKPQSGATYWDLADLLAWQNGGKLVFEDINKRGAQSLPIETRTHVGIDRKTLAAEDGRLFQTAAYDFAESARKHHQGWESHRYGFVIRTAADLQDNSVVRFGGEGRLSRLNKISDDVFKQPEYAYTNGLMLTLLTPALFDKGWLPGWLDSQTLTGKLPHTNLQVKLRAAAIDRWLPVSGWDLQQHAPKAMRKAVSAGAVYWFEIQSGNPAELTQAQWQAFSDSEQDRRDGFGIGLIGPWQSI

SEQ ID NO: 1358 - protein, 301 aa, Artificial sequence
  Neisseria sicca  derived Cmr4 protein sequence
MNTRIFHLHALSALHVGTGQGIGAVDLPIARSRATNLPLVPGSALKGVLRDEAKEKWHVSEDDIQALFGADSQADKENIHAGAAAFGDAHLLLLPIRSFAGTVAFATCPFILQRYARDVRGILPESPKVPALKDSASVPENTVLRVSGSQIALEDLDIGSETSTEAKQWAEHIAAAVYPENTANSEAWREQLCQRFIILPDSTFSFLADTATEIRMRIRIDRETRIVKEGALWSEENLPAESVLYGILAIDKSRHSRNAKSADELSALIPAGETQIQIGGKHTVGRGLCRLVLSDDLTKGE

SEQ ID NO: 1359 - protein, 124 aa, Artificial sequence
  Neisseria sicca  derived Cmr5 protein sequence
MPHIRSQKYAQRALGLIQRVKEKNEKVKEYRTLALNFPTMILQSGLAQAIGFLQAKGKEEHLLLLAHIAELLEENENSLHKKILEADLPHYQLLTRQAIEAASSLKRYTQALLPKPKDEQGGQS

SEQ ID NO: 1360 - protein, 373 aa, Artificial sequence
  Neisseria sicca  derived Cmr6 protein sequence
MTISLMRESLKKLISDDLKDAHAGLLMQRGLTKWDKDDKQAKAELIQKIVKIPTPKKDSLYALAFTRWVRATSDTDRFATLAAGISGRLYTGLNSAGALETGISTSHTYGMPLIAGSSVKGIARSHAESLGLDKAHLTVLFGDDSDSGSLKSGALVWHDAWFIPANTPPFAAEIITTHHQDYYNGKQLEADEMESPIPNQQIATQGSFYFVIESAPGAQAWAAYAQNLLFQALQTQGAGSKTASGYGYFTVADDDALGKIKHIQEEQQQALAAQQKAAELAAMPAHQQFIQTWQERMEEQPNKIIGNQAHDKLYQEWKAALQTAAESPDFNAAEKKEIADVFAVKKMMAKYAKWLTDKRGKELKPILAKLRGE

SEQ ID NO: 1361 - DNA, 936 bp, Artificial sequence
  Neisseria sicca  derived Cas6 optimized for expression in Escherichia coli
atgaacccactgaacctgccgtctgaactgccaatcgcacgctaccgtctgcacttcaccctgacccatgatctgcagctgccaccgtacgcagcttctaccctgcgcggtgtgttcggtcatgcgctgctggctgccgcttgtacttgcgacactccgcagaccccgcatctgccggattgcccgtacgcgcagattttcgagccggctccgtgtgctgatctgccaagctccgttcgtcagtctccgccaccgccatatctgatcgaaaccccgctgatcgcaccgacgcactttccggcgggtgccgactatgcgtttgatctggtactgtttggccgtgctcgtcactctctgccactgattgctgccgtcttcacccaggccttcgcacgtggtctgggcgcgaacaacgcgggcaaaggtgaactctctggcattgcggtacagcaggcggacggctctttcctgacgatcagcgaacgtggttccccgatcgcactgcacgacaaccacattcgtctgccagaacgttacccgactcaggcgtgtatccagctgctcactccgctgcgtatccagcagaaaggccgcattctgcgtgaaaccgagctgactcaggcggttttcctgcgccagctgatgcgtcgctacctgaccctcgctcacctgaactggggtaaccatgcgaacgctgccgagctgtctgcacagatcggcggtcagggtgttccgccacgtctgagctggcacgaacaccgccgtttttccaaccgtcagaaacagatcaccccgctgagcggcgcaatcggtacttgggaactgaccggcctgacgccggccttctcccagatgctgtatatcggtcagtggctccacctgggcaaagaaacggtgttcggcaacggtcagtaccgtattatccaggcagcttga

SEQ ID NO: 1362 - DNA, 1140 bp, Artificial sequence
  Neisseria sicca  derived Cmr1 optimized for expression in Escherichia coli
atggcactgctgatcccagatttcggtccgatggagaaactgccagaatccaaagaggcttggcaggaaatctactgtgaactggtgacgccgatctatggcggtggtgttcaggcagctatgccggacgtactgatgccaattcgtgcgaccgctatccgtggtcagctgcgcttttggtggcgtctgctggctcagcagaaatggaacctgaaagaaaaatctctgcgtgaagcggagttccgtctgtggggcggtatcggtgaagaagcagctgcgtccctggtgtttctgcgtgtgctggacgttctgaacgtcaaacagatcagctacttccagggtagcctggattcctctctgccatctgacaaaaaagtacgttccaaaagcaaatccaacgacctgaaaccgtacgcgtatgtcctgtttccgatggattccgaggaaaaacgtgagaaaaccctgctgatcaaagaaggcctgacttggaccctgcagtggcgtctctctgaaaaagccaacgaaacggatcgcgaacaggttctggaaactctgcgctggtgggtgaacttcggtggtattggtgcacgtacccgtcgcggttgcggtgcgttcgttgtcaaagacagctctaacccggttttcaaacagccgctgtccattgacgaggtgatgaaagcaggctgcaaactggttctgcgtacctctactaaccacgcactcctggcgtggaaagaagctgttcagcgtctccgcgatttccgccagggtgtaggtattggccgcaaccacccaagctctgatacgacgaaaccggccggtcgttctcgttggtctgaaccggatgagattcgccgtatcactcgcacccactctgatcgtcataaaccggaacatccagctggcgacctgttcgcccgcggtgtattcggtatgccgattatctttcacttcgtaggtggcgacgaaccagcagataccactctgcagccgaaacgtaaagaacgtatggccagcccgctgattattcgtccggtttgggacggcaaaggtggctttcaggctgcggcactgtctctgccgctggacaaagttctgaacgtgtctgccgagctgctggaaaaaaacaaaatccgctaa

SEQ ID NO: 1363 - DNA, 1752 bp, Artificial sequence
  Neisseria sicca  derived Cmr2 optimized for expression in Escherichia coli
atggctaaagctgctgcgaaatccctgttcgaagctggtgcgcagatggtcttcccgtttgtggacgagacgaccaaagaccgtctggaaccatgtgaccgcatggacaacaacttctccgtcggcaacaaaattcaggtgcaggtagaagcggcagatgatgctgccgtgcgtgatctggttgaacaggcaaaagccgctgcccagtctcgtttcgaaactatcgctcgccaggcgcgtcaggatctgaacgcagccctgcgcgatgaaatctggcagatgcagctgaacgactatctggaaatccaggctgcgtgggcacgtattaccgagaaaggttactccgatgcaagccagcgtgctgcgtctgctctggcggcacgtaaagctacccgtgatttcactccggcacatgcggctgatgcctgggacaaccgttttatgctgccaaaatcctctctggatggcgcacgtgaaaccgttctcctggaaaaagccaacggtgatgctgacctctctgacgtagcacgtcgcaaactgggtctgtctcgctctgaacagctggactgtgcaggtatcgtgaaacgtctgggcggtaacagcgaacagttcactccggttactcgtgtagccgctgacgcttggctgcagggcctgccggaaaacgagctgagcaaactgtgcgatgcgtacgaaccgctgattgctctgaacctggcgactcgtgtcaaaggcaaccagggtatctactccgacttcccgtttgacggtcagctgctgtaccgcaaccgtctggatgctgcactgtccgacaacaaaaacagcgctgacgcgtccgaaaaactgagcaaactgaaaaacgttctgaaaacgatctggcacaaatatggcgaaccgtgcagctattgggctatgctgctggcagacggtgaccgcatgggcgaactcctggaccgtgcgaaaacgattgaagagcatcaggccatcaccgaagtgctgtctacctttgcggaatctgttccggcgaaaatgcgcgatttccgcgcacagtgcgtttacgcaggtggcgacgatgtcctcggttttgttgcgctcgataaagcggttggttgcgcggatgcgctgcgtcaggcgtttagcgactccctgaaaaaagtgtccgacgttctgaaagccgagaaaaccccgaccctgtccgttggtctcgcgatttgtcacatctctactccgctgggcaacgtacgccgtctggcaaaacacgcggagaaagtggcaaaaggcgacaactacccggctgatcagcagcgcaacggtctgggcattaccctgtctgttcgttctggctctgactccgattggcgtgtacagtggtctgatgaagcaggtctggcagcgttcaaaaaatggcagaaccgttatcagaaaaaagaaatcagcagccgtatcgcctacgatagccgcgacatcttcatgcgtaccgacttcccgaaatccgccgatctgtcctttgagctgcaccagaacatccgccaggctgagttcacccgtatgctggatcgtgcacgtaacatgagcggcggtgaactgaaagacgatgtgaaaaaagagctgaaagcccgtctggatgctctgcagcgtcagctgggctctgaacacaccggtgcactgaacatcttcgcgaccgaactgatcattgctcgctggctggcagcgaaaactcagaacgacctcggtcaggaagcgcagagctga

SEQ ID NO: 1364 - DNA, 1164 bp, Artificial sequence
  Neisseria sicca  derived Cmr3 optimized for expression in Escherichia coli
atgaactcttatttcctggacgcgctggcaccgctggtgttccgcagcggtaaaccgttcggttcccagtccgataccgacgatattcagtttccgccaccgtccgctgcagcaggtctggtacgcactcagatcatgggtcagtccggctgcgattgggactctaaaacccagggcaaccgtgcgaaactgagcgacgctcaggttgatgagctgcgtcagattgccgttcagggcgcgtttctggcgaaacaggatatttccgacgacctgcgtatcctgctgccgaaaccggccaacgcgctgtatctgaaaaacaaagagaccgacaaaaccgaactggtacgtctggcgccgcaggccttcggctctgatactgcagcggatttcccgcaggctgatctgctgccagttcagatccagtcttccatcaaaggcaaaccgcagagcggtgctacttactgggacctggcagacctgctcgcttggcagaacggcggtaaactggtgtttgaggacatcaacaaacgcggtgcgcagtctctgccgattgaaacgcgtacccacgtaggcatcgaccgtaaaacgctggcagccgaagacggtcgtctgtttcagaccgccgcttacgatttcgcggaatctgcgcgtaaacaccatcagggctgggaatcccaccgttacggtttcgttatccgcaccgcagctgatctgcaggataactccgtcgtgcgtttcggtggcgaaggtcgtctgtcccgcctgaacaaaatcagcgacgacgttttcaaacagccagaatacgcctacacgaacggtctgatgctgaccctgctcactccggctctgtttgacaaaggctggctcccaggctggctggattctcagaccctgactggcaaactgccgcacaccaacctgcaggtcaaactgcgtgcggctgcgattgaccgttggctgccagttagcggttgggatctgcagcagcatgcaccgaaagccatgcgcaaagcggtttctgcaggcgcagtgtattggttcgaaatccagagcggtaacccggctgaactgacccaggctcagtggcaggctttcagcgatagcgaacaggaccgtcgcgatggtttcggtatcggtctgatcggtccgtggcagagcatctaa

SEQ ID NO: 1365 - DNA, 906 bp, Artificial sequence
  Neisseria sicca  derived Cmr4 optimized for expression in Escherichia coli
atgaacacgcgcattttccacctgcatgcactgtccgcactgcacgtaggcactggtcagggtatcggtgctgtagatctgccgatcgcacgttctcgtgctaccaacctgccgctggtcccaggttctgctctgaaaggcgtgctgcgtgatgaagcgaaagagaaatggcacgtgagcgaagacgacattcaggctctgttcggcgctgatagccaggctgacaaagagaacatccatgccggtgctgcagcgtttggcgatgctcatctgctgctgctgccgatccgttcttttgcaggcaccgtcgctttcgccacttgcccgtttatcctgcagcgctatgctcgtgacgttcgtggtatcctgccggaaagcccgaaagtaccggcactgaaagattccgcttccgttccggagaacaccgtgctgcgtgtttctggttcccagatcgcgctggaggatctggatattggctccgaaacctccaccgaagcgaaacagtgggcagaacacattgcagcggccgtttacccggaaaacaccgcaaactctgaagcctggcgtgaacagctgtgccagcgcttcattatcctcccagacagcactttctccttcctcgccgataccgcgaccgaaattcgcatgcgtatccgcatcgaccgcgaaactcgcatcgtgaaagaaggtgccctgtggagcgaagagaacctgccagcggaatctgttctgtacggcatcctcgcgatcgacaaaagccgtcactcccgtaacgccaaatctgcagacgaactgagcgctctgattccggcaggcgaaacgcagatccagattggcggcaaacacaccgttggtcgtggtctgtgtcgtctggttctgagcgacgacctgactaaaggtgagtaa

SEQ ID NO: 1366 - DNA, 375 bp, Artificial sequence
  Neisseria sicca  derived Cmr5 optimized for expression in Escherichia coli
atgccacatatccgttcccagaaatacgcgcagcgtgcactgggcctgatccagcgtgtaaaagagaaaaacgagaaagtgaaagaataccgcaccctggcgctcaacttcccaacgatgatcctgcagtctggtctggctcaggcgatcggttttctgcaggctaaaggcaaagaggaacacctgctgctcctggctcacattgcggagctgctggaagagaacgaaaacagcctgcacaaaaaaatcctggaggcagatctgccgcactatcagctgctgactcgccaggccattgaagccgcttcctctctgaaacgttacacccaggcactgctgccgaaaccgaaagacgaacagggcggtcagtcttga

SEQ ID NO: 1367 - DNA, 1122 bp, Artificial sequence
  Neisseria sicca  derived Cmr6 optimized for expression in Escherichia coli
atgaccatctccctgatgcgtgaatccctcaaaaaactgatctccgacgatctgaaagacgcacatgcaggtctgctgatgcagcgcggcctcaccaaatgggacaaagacgacaaacaggcgaaagcggagctgattcagaaaatcgtcaaaatcccgactccgaaaaaagactctctgtacgcgctggcgttcactcgctgggttcgtgccacgtctgataccgatcgcttcgccaccctggctgcaggtattagcggccgtctgtatacgggtctgaactctgcaggtgcactggaaactggcatttctacctctcacacctacggcatgccactgatcgctggctcttccgtgaaaggtattgctcgtagccatgccgaatctctcggtctggataaagctcacctgaccgtactgttcggtgacgatagcgattccggttccctgaaaagcggtgcactggtttggcacgacgcgtggtttattccggctaacactccgccgttcgcagcggaaatcatcacgacccaccaccaggattactacaacggcaaacagctggaagcggacgaaatggaatccccaatcccgaaccagcagatcgctacccagggtagcttctatttcgtaatcgaatctgcaccgggtgctcaggcatgggctgcatacgctcagaacctgctgtttcaggctctgcagactcagggcgcaggtagcaaaaccgcgtccggctacggttatttcaccgttgcggatgacgatgcgctgggcaaaatcaaacacatccaggaagagcagcagcaggcactggcagctcagcagaaagcagccgaactggctgcaatgccagcgcatcagcagtttattcagacctggcaggagcgtatggaagagcagccgaacaaaatcatcggcaaccaggctcacgacaaactgtatcaggaatggaaagcagccctgcagactgccgctgaaagcccggatttcaacgcggcagagaaaaaagaaattgccgacgtgtttgcggtcaaaaaaatgatggccaaatacgcgaaatggctgaccgacaaacgcggcaaagagctgaaaccgatcctggctaaactgcgtggcgaatga

SEQ ID NO: 1368 - DNA, 411 bp, Artificial sequence
  Minimized CRISPR non-coding RNA repeat-spacer array based on the Neisseria sicca CRISPR array
catggagcgttgtccaatgcaaagcagacggctataatccgtatcacaagttttccgacggatagcgaaaagtctgtctttcggctgctcttttcagttaaggttttattaaataatgtctttgttggttaaggaaaaatgctaacttttcttaactatatagaagattgaaaataatgaaattttttgactgagtgcagtcggaagacttgccccacgcatcggggattaagaccttcctgtctgtatccagagcaaaagtgattttgcgtcggaagacttgccccactaatcggggattaagacgtcggaagacttgccccacgaatcggggattaagactcgtcatttttggtcgagaacaagcccagtttagtcggaagacttgccccactcatcggggattaagac

SEQ ID NO: 1369 - DNA, 36 bp, Artificial sequence
  Minimized CRISPR non-coding RNA repeat-spacer array 1st repeat sequence
gtcggaagacttgccccacgcatcggggattaagac

SEQ ID NO: 1370 - DNA, 35 bp, Artificial sequence
  Neisseria sicca native space 1
cttcctgtctgtatccagagcaaaagtgattttgc

SEQ ID NO: 1371 - DNA, 33 bp, Artificial sequence
  Neisseria sicca native spacer 2
tcgtcatttttggtcgagaacaagcccagttta

SEQ ID NO: 1372 - DNA, 199 bp, Artificial sequence
  minimized CRISPR non-coding RNA repeat-spacer array leader sequence
catggagcgttgtccaatgcaaagcagacggctataatccgtatcacaagttttccgacggatagcgaaaagtctgtctttcggctgctcttttcagttaaggttttattaaataatgtctttgttggttaaggaaaaatgctaacttttcttaactatatagaagattgaaaataatgaaattttttgactgagtgca

SEQ ID NO: 1373 - DNA, 36 bp, Artificial sequence
  Minimized CRISPR non-coding RNA repeat-spacer array 2nd repeat sequence
gtcggaagacttgccccactaatcggggattaagac

SEQ ID NO: 1374 - DNA, 36 bp, Artificial sequence
  Minimized CRISPR non-coding RNA repeat-spacer array 3rd repeat sequence
gtcggaagacttgccccacgaatcggggattaagac

SEQ ID NO: 1375 - DNA, 36 bp, Artificial sequence
  Minimized CRISPR non-coding RNA repeat-spacer array 4th repeat sequence
gtcggaagacttgccccactcatcggggattaagac

1. An isolated polynucleotide, comprising
(i) a clustered, regularly interspaced short palindromic repeat (CRISPR) array nucleic acid sequence wherein at least one spacer of said CRISPR is sufficiently complementary to a portion of at least one prokaryotic gene so as to down-regulate expression of said prokaryotic gene; and
(ii) a nucleic acid sequence encoding at least one CRISPR associated (CAS) polypeptide of a repeat associated mysterious protein (RAMP) family.

2. The isolated polynucleotide of claim 1, wherein said at least one spacer comprises at least two spacers, each being sufficiently complementary to a portion of different prokaryotic genes so as to down-regulate expression of said different prokaryotic genes.

3. The isolated polynucleotide of claim 1, wherein said at least one spacer comprises 26-72 base pairs.

4. The isolated polynucleotide of claim 1, wherein said prokaryotic gene is a bacterial gene.

5-13. (canceled)

14. The isolated polynucleotide of claim 1, further comprising a nucleic acid sequence encoding a CRISPR leader sequence.

15. The isolated polynucleotide of claim 1, wherein said at least one CRISPR associated (CAS) polypeptide of a RAMP family is of a mesophilic organism.

16-17. (canceled)

18. The isolated polynucleotide of claim 1, wherein said nucleic acid sequence encoding at least one CRISPR associated (CAS) polypeptide of a RAMP family comprises a sequence encoding a RAMP module.

19. (canceled)

20. A nucleic acid construct comprising the isolated polynucleotide of claim 1.

21. The nucleic acid construct of claim 20, comprising a nucleic acid sequence selected from the group consisting of SEQ ID NOs: 1, 6 and 11.

22. The nucleic acid construct of claim 20, comprising a nucleic acid sequence encoding at least one polypeptide having at sequence selected from the group consisting of SEQ ID NOs: 1354-1360.

23-26. (canceled)

27. A nucleic acid construct system comprising:
(i) a first nucleic acid construct comprising an isolated polynucleotide having a clustered, regularly interspaced short palindromic repeat (CRISPR) array nucleic acid sequence wherein at least one spacer of said CRISPR is sufficiently complementary to a portion of at least one prokaryotic gene so as to down-regulate expression of said prokaryotic gene; and
(ii) a second nucleic acid construct comprising an isolated polynucleotide having a nucleic acid sequence encoding at least one CRISPR associated (CAS) polypeptide of a repeat associated mysterious protein (RAMP) family.

28. The nucleic acid construct system of claim 27, wherein said at least one CAS polypeptide comprises an amino acid sequence selected from the group consisting of SEQ ID NOs: 1354-1360.

29. The nucleic acid construct system of claim 28, wherein said first nucleic acid construct comprises a leader sequence upstream to said at least one spacer as set forth in SEQ ID NO: 1374.

30. The nucleic acid construct system of claim 27, wherein a repeat sequence of said CRISPR array is as set forth in SEQ ID NO: 1369, 1373, 1374 or 1375.

31-34. (canceled)

35. A method of down-regulating expression of a gene of a prokaryotic cell, the method comprising introducing into the cell a CRISPR system polynucleotide encoding a CRISPR array and at least one CRISPR associated (CAS) polypeptide of a repeat associated mysterious protein (RAMP) family, wherein a spacer of said CRISPR array is sufficiently complementary with a portion of the gene to down-regulate expression of the gene, thereby down-regulating expression of gene of a prokaryotic cell.

36. The method of claim 35, wherein the gene is not introduced into the cell by a bacteriophage.

37. The method of claim 35, wherein the gene is integrated into a chromosome of the cell.

38. The method of claim 35, wherein the gene is endogenous to the prokaryotic cell.

39. The method of claim 35, wherein the gene is epichromosomal.

40. The method of claim 35, further comprising introducing into the cell a naïve CRISPR array system.

41-44. (canceled)
